United States Patent Application Publication US 2026/0058010 A1 - sequence listing, part 40

SEQ ID NO: 475 - DNA, 1003120 bp, Homo sapiens
  source 1..1003120: mol_type = genomic DNA
agctgggtgcttgcctcagtcacttagttgttcacctgttcgcctgttgtgtgtgagttttgtggatgagagtctgtgtttgaggacagtgctcccaactgtattcttttttgaagattctctaaggaaccagcactctgaataccgagaaatggaattgaattgtattttcagtagagatggggtttcacgatgttggccagggtggtctccatctcttgacctcgtgatccacctgcctcggcctcccaaagtgagccaagtgagccaccgtgatggatgcctgtagtcccagctacttgggaggctgaagcaggagaatcacttgaacctgggaggcggagattgcagtgaactgagattgcaccactgcactccagcctggctacagagcaagactccgtctcaaaaaaataaaaataaaaaaaataattgaattgatgaatagtctgtattttaaaggactagaagcctttcttgttttgtttttaatagtgacaagaccttttattggtcttttttatcctgtttccattaagtctctccatttgagcttcaaacctcccagtttatatcttttgcaattctgatcttatatggaattaaatgaagttatgcacatatacacacaatatttatacatgatatgctacttttttaaatcctacagctgatttgttttacataaggatcttactttgttttcttcattcttcctagatcactaacttagaaaaaatacggatacataggtctccagtgcccaagaataaccctaaatctggattaatgtgttggacccatttctttctctttccctctccctcttttcccaggttttcttttaattatctaataagccccagaacttggctctgtgtgggtccaaagggacaggatttagactgaaagtttagcctcagtttgcttctttataactctgcatttttttctgaagctaacacttttatctaaagagccgcattgcaggagatgtactaggttcccaggttcctctaggctgggcatccatacgaggcattccagaatgttcagaggatgccctgagtgccaggccttagggagaataaagacataggaaaaatggtctcatacaactaattagagtcctcacagagcacacacgaaccttttgagcaagggtttgttgactgaataaaacacaaacaaaaacagacattgaaagaaggacattgtgtgctcagattctaagtgatgttgggacttgagctgagtcctaaagaaaactggaactcgagtccacaaagaagcgcagcataagtgaaggtcacaggataggaaggtgttgcatgaggtgtgtgtgtgtcggcttaactgtgtcacttaatatctaacattgacgttctgtgtcatcaaatcctgccccagccactgctgagaccctggtcagtgctggtcagtgctgctggaatgatagcatggaacctgggcttttgtctctccctccgcccctccaggctcctagaacattgccggaaacacaaatacctctccagctctggggaggtcttcgccctcctggtcagcagcctcttagagaacctgctggactatagaaccatcatcatgcaagatgagagcaaggagaaccgtatgagctgcactgtgaacgtgctggtatgtgacatgcctccggtgtgatgggagggtactgtcaggccgcccctgcaccctacagctcagctctaggtagatcccacaaacacagaggcgccctgaggcacctttgtggagccggtgtcttcctaagtctaattggaatggctggctcagctcacaggtatcagcagccacagaccctgaggataaatttggtgtgtttttgattgtttgttttaatttttatttcagtaggtttgggggtacagtggtttctggttacatggataagttttggggatttttttttttttttttgagacggagtctcgttctgttgccgggctggagtgcagtggtgcgatctcagctcaccgcaacctccgcctcctgggatcaagcaattttcctgcctcagcctcccaagtagctgggattacaggcacgcgccaccatgcccagctaatttttgtatttttagtagaaacagagtttcaccatgttggccaggatggtctcgatctcctgacctcatgatccacacgcctcagcctcccaaagtgctgggattacaggcgtgagccaccgcacccggctggataggttatttctttagtggtgatttttgagattttagagcacccgtcacccgagcactgtacccaaaatgtagtcttttatccctcaccctcctataaccttccccactgagttcccaaagtccattatatcactcttgtgcttttgcatcctgaggataaatatccccttttcttatggggatatttgttaaagggaaacagtgatctctttggaaaagtgaaacttttgaaaagcaacaatagtggtttgtctatttttgtgtcaatagctcttgatttatgttgggattctgtgatccttttttttcctggcagaacttttataaagaaaagaagagagaggacatatacataaggtaagctgaaggaaatttcttgcttctgctgtttatttcatggctttgtgattgatttcttcagtaaacaaatactttcccaacaccgtgtttgctgctttgagagacccctaaaagtacatgatacgctccattcaccctgaaccgacaaactctttagacagatacatgaataagtacgacaggaaggagtgcctatgtgaggtcatgtcagggatcaggggaaggatagacaacttctggcctgggtgggcaggagaggctgtacaggaagaggcaggaaaacccacccaagagtcttagcttgaagtctgcgaatccctgaacatgaaacaaacttgtacgtaaccaacgtgcatgttgttggggagagattccatagctttcattagcttcccagaggggtccaagacctaatatttaaaaacattaaacaccactgccttaaagaaagaagagaaactagtctaggtggagtcagagaaacacggaggcaggaggtgcacagtgtattgaagaaatggggaagatccgacttcttggctcaagaggaaggaattgcttctgtacagtagtggggaggggggtcaggcagggaagcaggctggggtctggttatggaatgagctgaacactaaatcaactctcgagcctgggcagcatggtgaaaccctgtctctacaaaagatacgaaaattagccgggcctggtggcacgtgccagctacttaggaggctaaggtgggtggatcacttgagccctggggcttaaggctgcagtgagccatgatcggaccactgcatactgcagcctgggcaatacagcaagaccctgtctcaaaacagaactaaaaaacctataaaactctcgagtgacaaaatgcttccttctccccttcttgccagatatctgtacaagcttcgagatttgcaccgagactgtgagaactacacagaagctgcctacacgcttctcttgcacgctgagcttctgcaggtgaatggctcagagagcttgtttcaacagggtggagtacagtgtcctttcagactaaattctatacatttcatgattttgatgggaaagaactttattccaggaatatccttttatacaagtttttttagttctttctaaataggcacagctaatttgtagatcaagtatgggaaaatgtcagttatcttttatttaaaaatccttagaaagcagagcacgacttatgaacctttggtaattgacactctaattaaagcaataaaacacacattgatgaatacataaaaaaatttgtaaaactgcagaaaactgcagaaagatgagttataagtgaatatagtaccatagaagtactctatttttattctctccctaaataaatgtatgttgtggtttagatataaatacatctatatgttatgaatcccaagtaattatttctagccctgagcaccttctctaactttggatttacatataaactttgattggccaatatgcagctcaaactgaacaaggcggtaacaggaacctttatttctcactctttgctcctccccagcccatcctacctcactttgttaccatgttactaataacattcccatccatttagttgctcaggcaacctcatagtcatcttcaatttctctcttttactcaccacctcccacattctccacaagcgagagatgtggcccctctgttcagaacatgcccctaacttatccgcttttctttttctttctttatttttttttttaaagagatgagatcttgctatgtttcccaggctggtctcaaactcctgggctcaagcaatcctcccacttcagcctcccagagtactaggattacaggcatgagccaccatgctagccaatccacttttctttatctccctgactaccaccttggtccatcccgtaagcatgtcacaccttgagcactacagcagcctcctgtttggtgtctctgcctccagttttgttctcagctattaatattcttttacagtttatattttatactaaagtaatatatgggcattgtccgaacatatgagttaaaaataggattcctatgcctcaccacttcccaaaggaaattcacaattcatatttaagtttagggcattaaaaagcttattgtataatggactgggcctggtggctcacgcctgtaatcccagctctttgggaagctgaggccagcagatcacttggggtcaggagttcaagaccagcctggctaacatggtgaaaccccatctctactaaaaatacaaaaaattagcaggcgtggtggcacctgcctgtagtcccagctactcaggaggctgaggcaggagaatcatttgaacctgcaaggcggaggtttgcagtatgctgagatggtgccaccatactccagcctgggtgatagagcaagactgtgtctcaaaagaaaaaaaaaaaaaaaaagcaacctactgtatatagcttaaaaagtgaggcttgttgactgtggatttcgccattgtatgatcagaaagaaatccccagtgtctgtaactgtaggtcttttcatttgggaaactcaggaaggtaaactctcctatcctggtgtaagatatgaggtatgaatgcagctttttttccccccagattgctattcaatagagatgctgtttgttaagtatagttcacattttgcttattggtataagatcccatctttattactaaattcttattttggggggagggaatctctttctagattgtatatgcttttacgtgggtctctgtctgttcatgtaccagtaccatactgtattaattattaattcttgatagtgtgttttatgacctggtagttactcttgattgctcttctttttcagagttttcctacctattcctttttgttaatttttccatatggactttggaaagatgaaatttaaaaattaatttagtgagaatttacatgttaatgaaatagaattttcttatccaaaagcatggtatgactttccatttgttcgagtctgcttttgtgcccttcaatggcgtgtgaaagttttctgcatataagtcttgcatattccttgtaatgttcactcttagaaatgttctttttggacttatttttgtttggttccattcttctattctgtatatttagtctccgtgtatctgaaataaattttatttcaagtatattaattgttcttcctgctgcgtaacttaattctcttattgtgtgtcgcagtttcttagtcaactgccttgcattgtgaggaatacaaccataatgtttgcaaattgtggtagttttacctcttcctattcatttttatactcctaatttgttccttttatctgactgtgttactgatgccccagtacaacgacagtcatgtcagttagcgaccttgctttgtcgctggcattttggggggatgctgtgagtgctccttcatttggcatgatactcttgttttggagctggcatgtgtatatgtgtgtatatgtaacttttgtgtttaatacataatctaaaatacaaaatcaatgagtcaaatatatatacaatattttcttgatgttggggggctgaatatttgttgtattaaccgtgtgtcgcttttcttccttttcagtggtctgacaagccctgtgtgcctcatttgcttcagaaggacagttactatgtttatacccagcaagagcttaaagagaagctgtatcaagaaatcatatcatatttcgacaaaggcaaagtgagtattggattgtttttgtactaggggaaagaggaaaatgaccgcagtatcgcaatacaattctgatgctcaccacttggagttagcactgactacccaggttcagggcactgtctccaacgagactgcccccgcttcagatgccatcttcaaatttgggggtccccagtccattcacagttctgggcaactgggtatacatctggggggcttccactgccccctcaggtttaatagtctgctagaacaaccaatagtacacagtgaagtgctatatttaaccattccagtttcatcaggaagaatgtaaactggggccagccacatgaagggacccatagggaacagtctgggagaatctcaagcgtggggcttctgtgtcttccccctgtgaactcggggcaccttcccagcaaatcagtgtgttcctcaatcaggaagctcacccaagccatgggtgtacagagtttttattggggtttcttttttttttttttggtaaatatggggtctcaccagttgcccaggctggtctagaacctagaactcctgggctccagtgatcctcctgtattggcctcccaaagtgccaagactacaggcatgagccactgtggggtttcattatacaggcaggattgaatgaatcgttaactacacaatgaacttgatctttagccttccttttgtccctgaagattgggctgatatcgcatggctcacagccctaaccttctagtcacatgattagtatttctggcatggcagcccccatcctgagactaggagaccaccatgagtcacctcattagcatagatttgggtatgatcctggggtgggggcaccaggaataacaaagacactcttattatttgagaaattctaagaaaattcaccggaactcaggaccaagaccagatacatgatttaatatacaacaataactcacagctactgtttattcttcccttgtgtattcttgaattctgagatttcagagggggacagattttgcaaacaatgattttaaaagatttaattttgaagtgtttcccaatggcttgtgggctctgcacacatttcctcagaagccagaaacaatggaacatagcaccttgtgaacaggaatgaagcaggaggtgacccgatgctgcaagttgaatagtatccgtctaagagacagctcatgaaataccaaaggggttagaaggctcaatctgggctgctagcctcagacactgaggacgtgctttagcctgtaacttacatggttatacatgctcggaggcatttcctaaaactcatccactaagtagggaaatcagtgccctgcattgaaatacagtttgccaaattccacactatcggggaaacccacccccaatatttcaacataggttctttctattttccataagtgttggccggctgataaataaagagaaagagtacaaagagaggaattttacagctgggctgccgggggcgacatcacatatcggtaggaccgtgatgcccacctgagctgcaaaaccagcaactttttgttaaggatttcaaaaggggagggggtgtaccaacagggagcaggtcacatacttcaaggggcaaaaagcagagcaaagatcacatgcttctgaggaaacaggacaaagggcaaaaggcagaaactcctgaagagggtctatgttcagcggtgcacgtatagtcttgataaacatcttaacagaaaacaaggtttgagagcagagaagcggtctgaccaaaaatttaccagagtggaatttcccaaccctagtaaacctgagggtactgcaggagactgtttattcttccttatctcaactgcataggacagacattcccagagtggccatttatagacctccccccaaggaatgcattcctttcccagggtcttaatattaatattccttgctaggaaaagaatttagtgatatctctcctacttgtacgtccatttataggctctctgcaagaagaaaaatgtggctgtttttgcccgaccccgcaggcagtcagaccttatggttgtcttcccttgttcccaaaaaatcgctgttattctgttctttttcaaggtgcactgatttcatattgttcaaacgcacatgttttacaatcaatttgtacagttaacacaattatcatagtggtcctgaggtgacgtacatcctcagcttacaaagataacaggattaagagattaaagtaagacaggcgtaagaaattataaaagtattatttgggaactgataaatgtccatgaaatcttcacaatttatgttcctctgccgcagctccagccggtccctccattcggggtccctgacttcctgcaacaccacacaacagtactgttagcctttttccatctccacaaacaacatcactacacctacacacacacacacacacacacacccatacacacacctgtacacacacatttcagaaccaaagtcccacagaaacttcccttccccctccaaccagacttgcatgctttccgaacctgggctggcagagcttcctctctactttgaagtgctgtaggtgcttgacctgttaaacacagtattgcttttttgggcgacacatggtacttattcttaatgtccgtgcaaacagaactacagaagacgcccctggcaaagctgccaatatacactgtctttatgatgtcaggaaatgaaggtttcactgatctaagggataaagcgagtgaggaatatctaccgaaactcaatcccccagaccacttgctcattcccagtgactcgccagtggcttttgccactgaatcaatgactgccttgttctccacttttaaccttactttcctttttctgaagatgtgggagaaggccatcaagctgagcaaagagttggctgagacttacgaaagcaaagtatttgactacgagggccttggcaacctcctggtgagtctgggtcaaaatatgttaggcctctgacagggttgctaaaattagcactcatgaaaatgtttccgtaagttgaaagtcaggatgaatggtgtttttttacaatggaaaagtcaactttgcttgaaatgagaatgaaaaaagatgtagtccaaaggctctgatcaatatttctgccaaatatccttcagagaaggttcaggacatctctggaagtggagtggggttgtctcgacagtgtggtggaatattgagtttcagatagtagtgactcgctttccacatccctcaggatctctgtctgcagctctctcattcttcctgaagccatttttctttctgtgggccctccatattcccagccatcagtaaagcaaaacaaaaatgagtgcccagtgttaggcagccaccattctgaaagctcagtggaggcagccaccattccgaatgcccagtggaggcagccaccattccgaatgcccagtggaggcagcaccattccgaatgcccagtggaggcagcaccattccaaatgcccagtggaggaggcagccattctgaatgcccagtggaaggcagccaccattctaaatgccccagcggtaggcagacaccattctgaatgcccagtggaaggcagccaccattccaaatgcccagtggtagacagccactcttctgaatgcccaatagaaggcagccaccattctgaatgcctgatggtaggcagccaccattctgaatgcccagtggtaggcaaccataatattaaatttaataatttctagtagaggagttagaaaagatcaggtcacccatagtcatgaaataatcatttatttgaggagctgggtgtcaagatcactttgtaaaaagtttaccagtgtgctattaccagcccctggcttcacatgcaaaaaactgacttattaatttcatcaactgggctgggcacggtggctcatacctgtaatctcagaactttgggaggccaaggcagatggatcacttgagcctaggacttccagacgagtctgagcaacatagtaagacaccatctctacaaaaaatataaaaaattagctgggtgtggtggcaccttcctctagtcccagctacttttgggaggctgaagtgggaggatcacctgagcctgggaggtcaaggctgcagtgaactgtaatcatgctactgcactccagcctgggcaacagaatgagaccctgtctcaaaaaaaaaaaaaaatttcatcaactgaactgagctgaaatattagtaatgtaacatgttacataccggtctaagaaaatagtattttgacgagaccatcacctagatagaagagtaatggcatgctaaccattgtaggggagggggctcaggtcattgctcaaagctgtccacgtctggctggctattttgctttctttaaggctgaccttgtgagccaaagctggaaagcccctcatcttgtgaagaattaaagataaagatggtagcagatactgaaaaaccgaacatcaccaccaccttctgggcacttataatttaccagacactttcatccagaccacctgcatgaactacacagtccttctttttaaaaatgttctttattttattattattttttcaaaacagggtctcactctgtcacccaggctggagtgcagtggtgcagtcatagcccactgcaaccttgaactcctgggctcaagacatcttcctgcctcagctgctggctaattttttaattttttgtagagatggagtctcactatgttgcccaggctggtctcaaactcctagcctcaagcaatcctcccacctctgcctcccaatgtgcaaggattataggcgtgagccactgcgcctggccttggaaggttctttatcttctcccatgggtgtctggttaagtgcagccgccttctgtgaatctcagaatgcactttttaaccttttgtagtccctgagcccactttgagaaactgctgaaagttgtgcactgccccgttacgcagaagaattccaacgtgcacacacttcagcatacaccctcagggagtcacagccttccaacgtccattcatggagcccaggtccaaaacctgtgatccgagaataggataacccttttctgcccatagggtgttttccaaagacctttcattgctctgggttacgtgggaaacaacaaaacaaagtctgactttttttttcccccaactgtgtacttataacctccccttggaatgtcttgttttgttttccagaaaaaaagggcctcattttatgagaacatcattaaggcaatgaggcctcagcctgaatactttgctgttggatactatggacagggctttccttctttcctacgggtaagaaacctgatggtggtctcccaggccattaggaggagggaagagactcatttcttttccagatgggcaacagggtgttagcagctgccgacccgtgttctcgctgtgggaggtaggggagggaaaccacttcctgagcagccggcctcttcaccccacacccccggacacccgtggtgttctgcaggtcttttgtgaaatgacttttcccaggtgcagtgaaaaagggaaaaacagaaccatcccccgcactggtcagctgctacgggtcacgccagggaaaagtgtggactgatgtatttcgttgtttaccatgtttctagccagagctaatttgaaaataggtatcccaagaaccagactgcaggagtatcccaaaataaaacattttattataataataatgacaaggatggtatttttcttccatctcaaaattgtgtataatgcgatattcaatttatagtttaataaataaaaattcttatctcttacgaaaagtttcttttagagctgagctttgcttaaacatttattatccatctgctttctcctaatttgaaaacaagcgataaagcaagcaatttacattcctaacagtgcctaatgagacagtttattcattcagtcagtaaatatttattgaacatctactgtgtgccaggcatagggaaggcattagaaagatcttgctgattacagtcaaacatagtccctactctcatggattttacaacctaaactcatgaggggagattttaatcacacatgaatgtaaaatttaatctgcatgtcggacgcagtggctcatgcctgtaatcccagcgctttgggaggctgaggcaggcagatcacttgacgtcaggggttcgagaccagtgtggccaacatgctgaaacgctgtccctactaaaagtacaaaaattagctgggcgtggtggtgcatgcctgtaatctcagctactcaggaggctgaggcaggggaattgcttgaacccaggaggtggaggttgcattgagccgagatcacaccactgcactccatcctaggtgacagagcgagactccatctcaaaaataaataaataaataaactataaccaagaaagataccctgtgctataagaatctgtaaccaggaagtatttacccaagtgaaatagaaacttacccttttacaaaaaatgtacaggaatatttatagcagctttaatcatagtcaccaaagacaggatccaatccacgtgtccctgaactggtgatgggataaacaaacttcagtgtatccacacaacagaatactgcagcagccaaaggcagtcagctcctgatacacacaactgcgggcatgattcccacccacatgcagcttgctaggtaaaagaagttacacttaaaaggctgcgtactctgtggttttatttatacgaaattcttgcctaggcaacgcttcctatcaggacagaaagtagatcagtggttgctggccagggggaggttggctgcagaagggcctggggaaatttttggtggcagtgaaactgttctgtatcttgattgtggtcctggttatgtttgtcaaaactcacagaattttacactaaaaggggtccattttactgtatgtagattatgtcttaatattattattttatttatttatttatttatttatttatttattttttttttttttgagacagtgtctcgctctgtcacccaggatgaagtgcagtggtggaatctcggctcactgcaacctccgtcttctgggttgaagcgattctcgtgcctcagcctcccaagtagcagggattacaggtgtgcacgaccaggcccagctaattttttgtattttagtagagatggggtttcaccatgttggccaggctgatctcgaactcctgacctcagttgatccccctgcctcagcctcccaaagttttggaattataggcatgagccaccgtgcccagcctatgtcttaataaaaaaaagaatcagggcctggcacagtggctcacacctgtaatcccagctacttgggaagctgaggtaggagaatcacttgagctcgggaggcagaaattgcaatgagccgagatggtgccactgcactccagcctgggcgacagagccagactccatctcaaaataaaataaaaaaaatcaggaaagactttccagggatcctctgtttcagctgcaacctgaaaggtaagctgggagtggagcaggtaaagggggtaggaataagcattgcaggcagaggaagcatcaggcaagagcagggcagtgccttgaaaggaagggccagtgcagcaggcacagagagagctggggtgccagcggggaggcggggagccctggaagagcctgcagggccttggggtttcctggggtgttctgtctacatcctgagagcagtgggagctgctgcagacttttcgtgttggaaaggtcatctggcttttgtctccatggtcatccatggagaatggatgggaggtgctgcaggtaaaccactaagagaccattgcagatgttcagaaaagagatgacaggctagactcgggacgtgggggtggtggctttacagagaagcggaaatactagaggggtggagatgaggtcacagccatctgatgattgatgggctgtgtgggtgaggaagtgagagttgtcaagaatgatttctgggcttctggcctgcatcattggagggggtagttgaaccatttactgggacaggaggaccggaaaaggccagagtcacagaggagagaatgaatttattccttgagtaaatatttattaaactcctaccatatacttggctctaatataggcatgggagcagagtcaaaacgaaccaaaatcttgaaattatctagcttatgttccagcttggagagatcaaaaaatgagataaatcaataaactatttagtatgagagatggcctagaacactgcctcctacagtgtagctactcagtaagtatcatggagaaaaggacttagggaaggggactagagaggcaggtgttggggatggagttacaattttaaatacagtaaacaagaaagacttcagaaagaaaatggcatttttgcaaaaaccagaaaaaaagttaaagaataagctatgcagctatcaagaggttgagcaaaggtcccagaccttgagaatagcaggtccaaaagctatgaggctggagtagttgtgtacaagagggtgtataggagaatggggcaggtggctgttggtaccagatagcagagggcctcccagggctttctaaagtgtttgcaaagtttggttttgcacgtactcaaggggaggtacatttggaacatccaaaaggcacaagtcaaccattagctgtatagatctggaactcaagtgaagttacagacaggagagaaaagttggtgagttacttgtatggagttaaaataaccgtggttggggatgaggtggaccaggcagaggaaagaataaagagtggaaggtctgaggccaagcatggtgactcatgcctgtaatcccagcactggtaggccaaggcaggagtcttgcttgagcccaggagtttgagaccagcagtttgaggccagcctgggcatcatagcatgaccccgtctctataaaaaaattttttaaaaattagccaggcatggtagcatgtgctatggtcctagctactcagtaggctgaggcaggaggattgcttgagtattggaattagaagtgacagtgagctgtgatcaagccactgcactccagcctggatgacagagtgagaccctgtctcaaaaaataaaataaaaaatagaaagagtgtagggtctaaatgcatcagggtctagtgttagctcagcttcaatccaggtcaacataaaagaacaacccctgccatagccgttacatatgcctgcatgtcccatgaaatcagaaatgtgaccacagagacagcagtgattctgtgaaatcaagaacaccagactttcaagtcgaaagcattctcgtctaaatcacctgctgagcgagtgtgcaattttggtgaaatcacgtaatcactgagtcttggttttctgatccgtaatttagaaaaataatgcctacatcgcaggaaagttttgagaattaagttaatagcatataggagtgctttataaactgtaaagtagtttagagatgttaacatacctcaaaggcatactgtagaatataaaatcctcaggagtgatataacctcactgccactctcttctatgggatatttccctgaattcagaatatttaaaattacatcatcctctccttccaacccaatgagatctcattatctcttttgtttctgtcaggggtaccactgttcttcctactccaagaccagtgacttttttttttttttttaagaggtctcgctctgtcatccaggctgaaatgcagtggtgtaatcacagctccctgcagccttgacctcccaggctcaggcaatcctgcctcagcctcctgaggaggtgggattacaggtgtgcaccatcacgcccagttaatgtttttattttttcttagatatggggtctcactatcttgcccaggctcaagaccagtgatctttgaatcagcgtcgactcccctgtctgccctgcccttctcccgacaccaaagaagcaaacactgaatgctgttacttctgtctctccttctgttacttttccttcttctgctcagtccagcctgtgagctttcagttgggcatagatgccactgttggcttacattgtctacacttcttctttcatcatgcatctcctgccttccagaacctccagtgaacattccaagtctttgaaacctctgcctgccatgcgagaccattcattttctggctcattcttccagtccaagctcatttcttctcccagaattctgtgctttccgcccctgggcctgactctttccacatacccacctggtccttcgcaccccttctctttacgcttccttatcccattcatctgtctatgcccatctaaggcccatgtcttgcttgaagccttctctttccagtcgagctaattcttcctgacctgcttctgtgattccttttacagttatcgtctgcatcatacaactagcgttgtattacactctgatcctttacccaccattgtttcatctgaatgatggaatttcaacaggcttgagtcccatagacttttcctaacttggaaaagttttatcatatattccaaaagatccagtagtttttactcccttcattcagtgtttgcctggaaagtgtaattgccctcacggtacttacactatcatgtttactaatatatttacttgcttgttttttattctctcctctagaaggtaagttctgtgagagcaagatcaccattgtattcctgttgtccagctgatcttctctttgtgcaatacatatttttatatgaatggacaagtgattttgaaagacattttacaagacaacctgggcccaagtgttgcttaaaaaggaatcatgtgtgggctaccaatggaaactgctcatttcaaacatggctatgtttgcacttgcccaggcaaccacacctgtgagacaaattactcccatgcctggggcctaggaaatctctttggggaaaaaaaaatgattaaagagattatatttacagtctagagtggagaaaatagtatttaatgcagtaattttctattagactttcaggattggctggggactgtggtacattgcttctgttctctgtcactctgtttctgtgccagaagacacattgcttctcctcattctcttatgcagtgctgtttaagtggtggtccacaaattgttgctggatggtgatgagatcgattaggagtttatacctcaatgtaaattaatgcacttccttccttccttaagaatgtcttgccatgaaaatatcagcatgcctgtggatgtcattgatttaaatgagggcacaagttccgtatttccttgcagatgggtccagactgtttgcagactggccatggtccttgggccacactggaagaagaactgggctaagtattttttatgcctgtgatttaacttctccaataaaccgcagctcttgtaggatatgatggtcgctgtcaggcaaggactagattttcagtgagaacttgatggtggggattgaacgttggctggggagtgcagtggctacctcagtacccggaactccagttgcctctccactcttcctatgtaatgacttccctttctgtgtctcacctgcagaataaaatcttcatctatcggggaaaggagtatgagaggcgagaggacttcagcctgaggttgttaacccagttccccaatgcggagaagatgaccagtaccacgcctcctggggaagacatcaagtcgtcccccaagcagtgtatcctttccggggggagtatggccccgaggctcttatggctgtgcacagccccagctaagccagagaacataggagctacagtcccttctctgcagacacaccatcttctcaagcattctgacacaggttcccattccatgtaaaatctttgggaccctaatagcattagctggtggtgatgacataacaaaagaggagagataatagacaaatgatggatatgaaatatacttcgtagccagatggggagcttaagtggaatatatactttctattgtgaattctggattctgttgtagactttgagacagtatctctgtcctggtgggttggggagctaagactttctaagacttgatcattaaatcagagcaggagcgcttacacttgagctgcttttgaagcctaactttaccatttaccagttgtgtgatgttggattttaacctctcttatcctcagattctccatctgtgaaaagagaataagaatatccctcatgtagagttgttgtgtatagtagagataacacattcaaaatacctagcacagtgcccaactatggcactggataaacagacgggatccaaagataaaagtaattcttgttgcctgggctctgattctggtgatttcagagggatgcttgtcccaagaaattgtttaaatccatttctaagtacctatttcctgatattgcattgatgtctatttccctatggcaaggattgtttgccagatgtctgaccgaaaaaaaaaaaagggccctaggattaattataatcactgaataaggcattccagtgatacacaaaggaactcccattttcagtgtggtcctggcattggggtcaaagggagtgattggtgctggtggcatttccggctgtgaagcaggaggaacaggggtgtttggtgtctgacaccttcacgaccccagcccctctcctttccttaacgagctcttcagacatgcagtgcttcactgtaaagccagtgatgagcttgccgcccagctacaaggataaacctgttccagagcagatcttaaagtaagtggtttttcatttaaaaaaaaaaaaaatctgtgtctaggcacagtggctcacatctataatctcaacattttccgaagctgagggaggagtattgctcgaagccaggaatttgagaccagcctgggcaacaaagtgggatgctgtctctacaaaaaagagaaaagtttgtctctccctcacacctgtttggagtacatcaaaaccaaagccttacatttattacagtttgcaagacctactgtctgttctactttgagtgtaagataaaagcttggtaatacaaagggatgtgggggttttggtttttttaggcagaggaaaatcagaaatttcacacctagcttacagatccctgagcttttattttcacccaaaagcatcgcagaggagtggctggtccccagtgatggaggggctcattccttgtcttgaaaagctgaatgctaacagtattgaaagaactgttataaaactagactaatgagatcacaaatgtatgtgtaagtgcatacacctttttttttgtttttttttgagacggaatcttgctccgtcacccaggctggagtacagtgcgtgatcttggctcactgcaacttctgcctcccaagttcaagcaattctcctgcctcagcctcccaagtagctgggattacaggtacacgccgccacacctggctaattttttgtattttaatagagacggggtttcaccgtgttgcccaggctggtctcaaactcctgagctcaggcaatccgcccactaagagacagggtctctctgtcaactaggctggcatgcagtggcacgatcatagcccactgcaacttcaaactcctgggctcaagagaccctccctcccacctcagcctcctaagtagctgggacatacaccaccacacctgtgtgtgtgtgtgtgtgtgtgtgtgtgtgtgtgtgtgtgtgtgtgtgtgtgtaaatgggatcttgctgtgctgcccaggttggctggtcttgagttcaagcgatcctcccacctctgcctcccgaagtggtaggattacaggtgtgagccaccacacctggccacatataccttttaaaattgtgtgctgtgactttgaggctgaggcgggtggatcacttgaggtcaggagttcaagaccagcctggccaacatggtgaaaccccatctgtactaaaaatacaaaaaaattagccagtcgtgatggtgcgtgcttgtaatctcggctactcaggtggctgaggtaggagaatcacttgaactcagaaagtgcagcctgcagtgagccaagatcgtgtcactgcactccagcctgggtgacagagttagactctgactcaaagtagataaataaataaaaataaataaataaaattgtgtgctgtgaaataaattcctaaataatataaaagtaaggtgtgaaataaaatcaaattgtacactttctcaggccttcatgtggaggcactattgattatgagatagcttagtgggtaaaactcagaccaggcagatgtgttataggttttgttgaagtcaagtcaagcagtggttgttctaagagagaaaaatacagcattgctttgtccttctccagctactacagagccaatgaagtgcagcagttcagatactcccggccgttccggaaaggagaaaaggatccagacaatgaatttgctgtgagttcaccccttttgtcctttaagaggtaaaattaacgggctgagcacggtggctcacgcctgtaatcccagcattctgggaggccgatgcgggcggatcacgaagtcaagagatcgagaccatcctggctaatacggtgaaaccccatcggtactaaaaatacaaaaaaattagccgggcgtggtggcacgcacctgtagtcccagctactcgggaggctgaggcacgagaattgcttaaacccaggaggcggaggttgcagtgagctgaggtcgcaccactgcactccagcatgggcgacagagcgagacttcgtctcaaaaaaaaaaaaaaaaaaggtaaaattgacatcccaagtggagatcttccacctacctaaccagcttccacaggagaaacgatggcacccctgggaacagagacttcacctgctaattacctagacagcaagtactaattacctagacagccagctgtcatctccatggaaaatgctagactaggagtccagaatctggtctcttcctgggcctgctgcttgtaatgaccttgggctagtcatacctctctagacctcacatttccctctgtagggtgagaagtcccaagtagacgatccctttcagctttaaacatccagaatccttgaattttatgagaaaatttggctcagtctctacgaggcatttgagaatagaatctcacttaagtgaaccagggagtcttgctgttttccctgggaattgaccaacatttcatgttttcctcctgggaattgaccaacatttcatgttttccttcttgccaccagacgatgtggattgaacggaccacgtatacgactgcatatacctttcctgggattctcaagtggtttgaagtcaaacagatttcaacagtgagtcatttgaaattggcatttagaaaaaaactttctgtttccaaatataataacagcctttgttgaattccctctgcagttcacaccagcttggccagcctcctctggccaactttgtttttcaaaagagaaataaaaggcatgcttatataatagagctcctttgtaaaactgatgtgacaacaccagccctaaaggtcaatcacagtgaatgactcttttatgtccagaggagtggtgtctgctcagcgatcctgccagcacccagaaacatttttggaatgctgctttggagtttcttgtcaattacatcttccctcccaaagcctgttctcttcttttattctctgctaatcatatccacagttaccctagactcctccctcttcatctcgcccaaaagctgcttattttacctgtttagtattgattaaatctgttttatttcccacctcctcattggcctccctgccatgcatggccttctcaggtccagttacctcactgcctcagtgggaattccattaaggaaatctcaccatttcgtccattctcgtgcttaaagtccttccatggctccaagtacctggagtataaagcctgtcctccttagcacacacacgtatggcctaactcttctgccccatctcctaggcaatctgttggaaccatactgttcatcccatgctaatttcagtcctctgtgacactggatcgttttctctgcctgaaacacactcttgcaatttctgcacctaactaactcccatcaaggttcagtttaggcaccagcttctcaatgaatccatctctggaacacccaagttgggtgacctgccctttgtctgtcccctgtggcatcctgggcgtgtttctaacctaccatgtttacatgtcctgagaccccgctaacaccatcagctcctccaagccatgaaatacatacatcttaatcacttttgtatctgtggtgcatagcatggcacttagcctaaagtaggtgttcaagaaatgtttcttgaccaaagctgaactgaagtttgatgtgttataagtcatggctaggtacagtggctcatgcctgtaatccctgaactttgagaagccaaggtgggaggatcacttgagctcaggagttcaagaccaccctgggcaacatagcaagacccccacctctacaaaaagaatagcagtatgtggtggcatgtgcctgtcatcctagctacttgggaggctgaggcaagaagatggcttgagcccaggagttggaggttacagtgagctgtgaataattgcactactgcagtccagcctggtcaactgagtgacaccctgtctctaaaagaaaaaaaaattagacattattcctcagttatggatatgaattttggatggagacttttggaatcaagtctggaataggaggtcatgttgactgataatgggtaaaatgaagaaggagatactttttttttttttgaaacctgattttgtagacatttccataggaagaactctctgaatctgtactgtgtctcattttcttttcattcaaaattcagcctgtatattcgaatacatcctattatttctgacttctgatacacatagaattcatactaagattatgtatggtctgaatgcatggcctccaagatcacttacctcttttcatggaggaagcatcaaacgttttgccagtggacattcttggtggttcagaagtgactcagatctgatatcctgctgttctcttgtcgttgatcttctcaaaagtctccaaggaagtgttgcctaggaaatgattcttactacaggtccagttcttttcttctcaaattttctgtagacattttgtccaaggaataatcattaccatagctccaatgtttaagtcatcattctactttgtaaggagattttaaatagcttattttgtatcttaccactattccaaaaaattgtggtgtccttataagctagcagtccccaatctttttgacacagggactgctttcctggaagacaatttttccatggacctggggtgggaaggtggggggtgttgggggataggggatggttttggaatgattcaagcacattacatttactgtgcactatatttctatcattattatattgtaacacatattgaaataattatcatgtggaatcagtaggagccctagcttgttttcctgcaactagaaggtcccttctagaggtaatgggagacagtgacagatcatcaggcattagattctcataaggcatgcacaacctagatccctcgcatgtgcagttcacgatagagtttgcactcctatgaaaatctgataccaccactgatctgacagcaggcagagctcaggttgtaatgcgagcgatggagagtggctataaatacagatgaagcttccctcacttacctgtcgctcacctctggctgtgtggcctgtttcctaataggccacggactgatactggcctggcattttgggacccctgctataagtctaaccttgattagcaaatcttcccttttctatagcttgtgggcattttatacctcttcaagggaagagttaaacttttttcagtctttacttggagctgacaagtgtcctctttctcccatgtgctctgtcactcaggaagagatcagtcctctggagaatgccatcgaaaccatggagctgaccaacgagaggatcagcaactgtgttcagcagcatgcctgggaccggtccctctctgtgcaccctctctccatgctgctcagtggcatcgtggacccggccgtcatggggggcttctccaactatgaaaaggttcgcttggtcccagaatcccctagggattcacagacctgggtgtctgtgtgcctccctctgtgccatttgccactgacaaattcatttcctacagctgctctaagaaatgttcactttcccttctggcaagtgaagtgaatgaaacgattgtccctgacttcttagagactatcagcaacccagctggtatagaacttacctagtaaagcgtcacagaaaaaaaaccaacatgcctctggtcaaagcacctgttattctgtctcccctgagggttatacaaactgattggtggaccccagaacccaggcgcactggaaatgaagcagcatctctggggatggcagagccacactctctttagaattagcttctaggggccaggtgtagtggttcacacctgtaatcccaggatttagggaggccaaggcaggtggatcacttgaggtcaggagcgcgagaccatcttggccaacatggtgaaaccgcgtctctactaaaaatacaaaaattggccaggcatgatggtgcatgcctgtagtccgagctactcaggaggctgaggcacgagaatcacttttaaccccagaggcaaaggtttcagtaagccgagattgggccactgcactccagcttgggtggcggaattagcttctaggacccctgcctgacttggtgtgccagaggttgtatggacaactgatggccctgactctacaattaaattagttcaactaagtattcttagttgagacatgaaagcagtacttggcacaatttaatccatgggatagggttaggatgtaacagcatttaaaatacacatcatgcattcagtgtatgttaggtataattaatggaggcagaatttttcattgctgtggtatgtttacagtggttaaatattttttgaatataaactttttggatataaatcaacatttgtcaaggacgcccctgtggagccgcctggagagtgggtagaaattaaaggagccagaggggaagggtgagcagcattaattgggtggcactcttgtgtccgtgtgtgtgtgtgtgtgtgtgtgtgtgtgtgtgtgtcccgggaagagcaggagctttgcactcagttgctcccaggacccagttctggcttccaattggccactgtgtgctctgggcaacatgcttcacctctctgagctccatatatctgcaaagtgagaagaatgcctgacttggccaggcacggtgactcatgcctgtaatcccagcactttgggaagccgaggcgggagatcacctgaggccaagagatagagaccagcctggcgaacttggcgaaaccctgtctctaataaaaacataaaaaaatcagctgggcgtgatggcgggtgcctgtaatctcaggtactggagaggctgaggcattagaattgcttgaacccgggaggtggaggctgcagtgagccaagattgtaccactgaactccagcctgggtgacagaacaacactccgtctaaaaaaaaaaaaagaagaaaaatgcctgactcacaagatagatcacaggatggtttggaagattaagggagacatcctgtgtagaaggaacatcagacagtgcttgacatagagtcgaggcttcaccagtgttggttttcttcctgcctacttggagcagacggtgtaattggaatgttcttcatgggtggtgacatctatgctctgtggctgccactatgatcgtcttctttctgtcctttttctcaggctttcagccttctgtagccttattatactcagcagctgggaaagactcaacaccagagacaaattctagtttctccatgttaggtgccataataatatccagtgttacaatggcagtcaatataaaaataggatctaatatacactactttttaaatactgtaatactttcagtgtgtactttttcatatatattgtttgatactaatcttcatgtattttttccaagtattaatttttacagaatacccctaatcacagatttatatatgccaatatctgtgactgacacataatatcatatgaagtttttccagcgtgacagtgttctaattaaaatgaacaaaaagctaggataaatacatacatacatacatacatacgtacatttcgggacctttggcttaagatactaatgtattcatttagttaatatgtatgactgcacatttctaaacgtaagaaaaaggtaaactcattaatcaccatgatgtattgcaatcagtggggtagcccgtcattacatatttgatgtaatatgtaatggtaataggtagtaggtaaactattctaatccagctctttattcatcgccaaaatgataagaacacaggagctgtgtgctgtaattcatctcccctttctgttctgaggcagaaccctactagaaaaatgaatttcagggctctctgctccagtgttccctgatctaaccaatactttgggaatttccatgtgtcctaccatttaccaaaaacaaaattgttacaactttcaaaaatttcaagtacttgtatttgaaaggtaaaagtcaatgaaaacttaagtaaatactcctttttcatttatactgacagtccctctaaatacgatcctggctagaatgagctgttttgctaatgtattatattgtcatgcttctttttctgataattatttcatatatattcatattctctgttgtattagtttgctagggctgctgtaacaaagttctccaaactgggtggcttaaaacaacaaaaacttcttgtttcactgttgcacgagcaagaagtctgaaatcaaggtgtcacagtgttggttccttccaaggatgtgtgaaagaatgttccatgtctctcgtcctggcttctggtgtcttcttggtgctccgtggcttgaggatgctcctccatgtcttgtcgatggccatcttcttgcatctcttcacataatgttctcccagtgtttgcacttctgtctccaaatttcccctttttataaggacaccagtcatatgggcttaagggcccaccctactccagtatgtatgacctcctcttaactaattaaatctgcaacagccttgcttccaaatagggtcacattctaaggtaccaggcattaggacttcagcataggaatttgggggacataattcaacccataatgtctgctcgcaagataggctttgcacatactttgtttgccacgcaaaatgggccattcacttttataagtctgtcctgtagttccaggagctcttggttttatataatggggggtttggctctcaaggcattaaagcagaagaccgaaggggaatctgaaggctggtcttcgaaagcactttcagaaatgaatgttaaggtctgggaagaaaacatgtcactccaattttggagtctgttggaaacgtttgctgcaaacttctatttctctttcctgatgaattctgtctttaaaacagtaccctatataaggcctgtgtttggaatttaagtttgggttttatttacctgttacagggacttagctggggggtcatgagtgtttactgatgagcctggtgctgatatataataataagggcaaccagcatttaatatatttgaaatgtcttcacatctacatctcattttctttttaaaatagcacttgggataggggactagtaagaaagtgcaaatattaaccttcacttaatataggaaaaaagcgtgatatagccaatgtcacgggacgagcagaaaaactgtcacctccatcttctgttttttaactttttgctctttcccttataatatctatgcacttaatttaatgattagccttgagatattgccatttcgcctttgctttgttctttgggaaagttattttaacgaatgacgttttgctttgttgatgatgattatttgattagtgtgtgtgtgtggtgggctggtgactgttaagaatgtagttttgctaagaatttgctaattaaggaaagaccacacaatagcacacacttttttgcattgtccaacatagtataagagctgtctgaggaaagggatgcatttttagttagacacatctggttcttccgcacaggacacatgtttcacccttccaggctttcctgcacagataggaatgtgttctaattaaaacttgcatatgcttttttttaggctttttttacagaaaagtacttgcaggagcatcctgaagaccaggagaaggttgagctgctaaagcgactaatagcattacaggtacaggacggctttcctctacactcccagggaggccacagtgtgggacacccattattctccagggcttaagtctacaagcccactcagggtgacttttctttctttttttaacccttgtgaaagcaccacctatctatgtatttgtttgctcggccggcagttaaactgcccagggttgacggagccttcttaaagctgagatcaaagttcatcggctggggccgggcccagtggcttatgcctgtaatcccagcactttgggaggctgaagtgggtggatcacctgaggtcaggagttccagaccagcctggccaacatggtgaaaccccatctctactaaaactacaaaattagccaggcatggtggtgcatgcttgtaatcccagctactcaggaggccgaggcaggagaatcatttgaactcaggaggcagaggttgcagtgagccgagatcacgccacagcactccagcctgggcaacagagtgagactccatctcaaaaaaaaaaaaaagaaaagttcatctgttggtttcctggcatgtgtttccagctgagagatgctggcctcatttttttctctcaagacttcagtgggcagtggtagaaaacatgactaccaaattcagtctaagacttaaacctatcagttgctcatccacggaagtgccccaggactccgttagatttgcctcatcccacagtccttccccagtttagggccaacctgtattcttggtgtgcacattttcccacatcattgaccaaagtccatccagtccacaagtcctacactgagaagtggccttcccattggccagcactatgtctagcagtttacctttccaccccatccctcccttccccaaccaaatcaaaacgatccctcttcctgaagcacactgcactcattttttgcccttctttccagatgcccctgctaacagaagggatccgcatccatggggagaaactcacagagcagctgaagccgctgcatgagcggttgtcttcttgcttccgggaactcaaggagaaagtagaaaagcactatggggttataacactggtaagcatgatctaagtagccttcacacctttttctaggctctgtgaccttttatgacactgattcgtttttcagatgccaagtgagttgtaataacttagctatggcatggaaatagtgaggctggtgggagagagtgtgttcccctcttggtgaccttgagcagtccttgtgctggtcagaggttctccaacttgaacaactatcagaacctcccagagcgcctgtgaaaatacagatggctgagccatcataaccctggagtttatgattccatagatctgggggtggggcccaagtagttgcaattctgagaagttcccgggtgatattgatgctgctggtctggggacaacactttgagaaccactgtactagaaatcaggccaggtgcagtggctcacagctgtaatcccagcactttgggaggccaaggagggctgatcacttgtggtcaggagttcgagaccagcctggccaacatggtgaaacaccatctctactaaaaatacaaaaaattagctgggcatggcgtcaggcacctgtagtcccggctattcaggaggctgtggcaagagaattgcttgtacccaggaggcggaggtttcattgagccgagatcacaccattgcactccagcctgggcgacagagcgagactctatctcaaaacaaacaaacaaacaaaccaaaataactcaaagttttctgaatcctagacactggttattcttgtgctgtctggccaaattcttacattttttcctaatcttagaaatagtatctattttgatgaaaagtatacagttttcacgcctttgaagggaagaaggaattgtgaattacatttcatatgcatgtagctgctttcataattgtttttgacgagctcctcacagctacaattttcttttctcctcctgagcagttcagtggatagtgcgtgtatgtactaaccttttctctccagtgagtgatggtgtaatacgttctagctctacttatctgcatttttttctttgaattcatcctgttctctttaatggtcttattctttttgttttgttttgtttttgtttttgagacaggatctctctttgtcacccaggctgaagtgcagtgcgagatcacagctcactgcagccttgacttcccaggctcaagccatcctcccacctcagcttcctgagtagctggaactacaggtgtgctccaccacacccagctaatttttttttgtttgttttttgagacagagtctcgctctgtcgcccaggctggagtgcagtggcacgatctcagctcactgcaagctctgcctcccaggttcacaccattctcctgcctcagcctcctgagtagctgggactacatgtgcccgccaccatgcccagctatttttttgcatttttagtagagacgaggtttcaccatgttagccggaatggtctcaatctcctgaccttgtgatccgcctgcctcggcctcccaaagtgctgggattacaggtgtgagccaccgcgcccggcccacacccagctaatttttaaaacttttttgtagagatagagtctccctatgttgcccaggctggcctccaactcctggactcaagcaatcctcctgcctcagcctcccaaaatgctgggattacaggtgtgaaccagcatgcccagccctttaatggtcttattcttaaaccccttattttcacattatttcctcaaaccaaagctctgagtttcttttcatgctcttttctcccccattcctgtctgcccaccttcagtacagtttcctccagggtatctttttgagcgtgtctttcagccattaagtgttcagtcgtgccttcttcctaagattgtgcctcctaacctgctgctacttaagagtttttctaggagcatttgtcttttgcacacacattcctagacagcaaagactgtcttcgatttaatgagcttagtcattattagaacttggccggtattagtgagtcattttcatatggtggcatctgggggtaatcctactggtgacatttctagagaacataggattcaccaggttaagctgcatgtctacagtgtcaatctaacaattttctctaaccccaatattccatattttaaaagactgaaagcagctgagctggggaagcagacggaaggttttgctatttattggagagtgtgaggcacatcttaattttttcctgtctcatttaggtagcagaaaattatgacaactttttctctagtcttagcatcagggaggtttaacctaagttgtacctatagctaacagtatcagtacatgcaatatttaacaatagaggcagcacaggcaccaaccaatcagaatggggtgccagccacataaccagtacagatgggtactggttagccacaagcaaacagggcagctgtggccagttcataggggctggattccaggtccgctaaccatgtggagtcatatgttttcagccacccaacttgacggagaggaagcaaagccgcacggggtctattgtgctcccctacatcatgtcttccactctgcggaggttgtccatcacctcagtcacttcctctgtggtttccacctcttcaaactcgtctgacaatgctccttccagaccgggatctgatgggtaagggtttcatctttaatctgcaggaagggtggggtaacgccttactaatgtttgcctttagccacgcatcactcctttgagaaaaatagcctttgggtcattctcattgtcttcctcatgaggaatgtcatgattagcagaataataacaacagttactaaaaatgaaaaatgacaaagaaatcacccataatcctaccacactattacatacctatagtcattacctatttttttcatcatttccattttaaaaaataaatttttacatctattttatgaataggttttataatcacatggcatgaaattccaaaagaaccaaacgatatatcacaaaaaatctccctttaatctgagacttcccactacagtagaagccctgcagtagccccacccctagagccagatgatgctaacattcaggttcttggtagccccatggcagctctttataggttcacaagcattgcgtaattatgtgttcttccccacactttttttatatgaatggtagaattttctttactttgctttttttcatttaatattatatcttgaaactctttccatttcagaacataaaaagccccctctttatgctttctgtagctatagatatggctcattgtatgtatgtggcatgatacagattgagtatccctcatccaaaatgcttggggcccgaagtgttttgaatttcggatgttttagtatttttggatatttgcgttatacctgttcagcatccctaatccaaaaaccccaaatctgaaatgttccagtaagcatttcctttgagcgtcatgtcagcattcaaatatttcacattttggagcattttggattttggattttgggattggggatattcaacctgtatattctaccagtgcttactggtggttattcagttgctttcactctattactgttacttcagtgtgacaatgaataaccttaaacacatgttattttgtacatatacaactatatcaatatgggaaaaatctcgtatgtgaaattgctctgtcaaagatgtatatttgcaattttgaaaattattcctaaaccgacttccataaagattataccagtttacactcccaccagcaacacacaggagtgcctagttactcaccctagccaccaaactgtactcttagtctttttaaattttaccaatctgataggtggaaaatattttcttgtatactttttgtttgttttttggtttttgtttatttttcttgttttgcctgaagttgaacatcttttcatttgtttgtagttttattttctgtgacctgtggtcaaatacttttttctgttgaattgttggccctttgtctgtgaaatgagttgaaatgttttctcctaatttctcctttatcttttgacttctaatttgttgcttctaattttttattgagttgtgctgatttttttatgtagttatataatcaatcttttattttatgacttctgggttttatttcacaattaaaggcctttcccactctaagataacaaaaaaggtactttttttttttcattgacttttagggtttcactatttacaattttgtctgtaatcctttagaatttattctaatataagatgttaagtatggagccaacatttttatttccaaatggctactcaattcttcttataacatttagtgaacaagtcatctttttgttttttttgaaatgtcaatcttataaaaaatcaaatttccacatactctttagtctgtggacattttttttctatttcttagatttacctgtctattcatgtatcagtactatgcaatcttaattattatagatataaaacattttttatttcctaatattccttttcagaatttaatctggctagtgtcgctattgctcactgttagattaacttgtctagaatcctattgctatttttattaggatcatgttaaatgtatggactaactttaggaagagtgatggctttttgatgctgaggcttccttgccagaaacataaaatgcctttccatatgttcaaatttaaaatatttgaaaggagttatagttgtgttctttctgcctagcaatatatttaaataatatattgctaaaatacaggaaaggtttaaaagaaaacaatgctttattacttcatcactcaaagataaccaccgttaaagctcaggtatataatatcaaaaaagtatgtttattttttattttttatttttatttctttgagatggagtctggctctgtcacccaggctggagtgcagtggtgcgatctcggctcaccgcaagctccgcctcccgggttcacgccattctcctgcctcagtctcccgagtagctgagactacaggcgcccgccaccatgcccgactaattttttgtacttttagtagagatggggtttcaccatgttagccaggatggtgtcgatctcctgacctcgtgattcgcccgcctcagcttcccaaagtgctgggattacaggcgtgagccaccacacctggccctgtttattttttatacaagtggaaaagcattgcatctatcatgttgtgacctactgcttaatttaatataggtgatgagcatttatgcatcattaagtatttaaaatagtcttgaatataagttatcagttgactcaccattttttcacaaatgtttaattccataatacaataattacatcataaaaataacctacctgaatgccaccctgcctggaaatcaaatatgtagtgtttcttaaattatgcattcttttccgttgatataggtatatttacatagctccaattatagcatatagtttggtactttgctgttctttcttacctttttattataagcatttgtcatgttgctgtgtaatttttatttatgtatttttttttgagacagagtctcgttgtgtcgcccaggctggagtgcagtggtgcaatctcggctcgctgcaacctctgcctcctgggttcaagctattctcctgccttagcctcttgagtagctgggactacaggcgcccaccaccacgcctggtgaagttttatattcttagtagagacgaggtttcaccgtattggccaggctggtctctaactcctgacctcatgatccgcccacctcggcctctcaaagtgctgggattacaggcgtgagccaccgtgcctggctgtgtaatctttattactatcagcttttaccatcatttttgatggcagttgacattgcatcatacaaatatgccatgattaattattcttctactatagaatatttaagctgtatccttctttctaaacaattaaccataaaacttcattatagattttaatacaaaaatatgtatgtaacttgtatcagtataaaatatatttttattaaaaactatagcaaacatatttggacatgtagctttcttattaggatgcattcttagaagtggtgggattatttctagaatgtagtaatctagattctagattacttctagaatctagattacattctagtagtatatagtaatctagattactacattctagtagtatgtagtttgtgggtaggatttgaacacaggctatctggctccagagttgtgctcttacccactacataaaactgtctattgaatctcttactttaaagattctgtctttgcctgtacattgaattaagcccttcacttcctgggataagatactccctaatattttcgtccagtcgtctgatggtcttgtttctgtacattaacaccttgagatgtttgttcagttgtaattgaaaatttagatttagaatctgagagtgaagtcataggtcaagagtaggttgaggaggccgggcatggtggctcacgcctctagccttagcactttgggagggctgaggtaggagcatcacttgagcccaggagtttgagacagcctgggcaacagtttgagaccagcctgggcaacatggtgaaaccccatccctactaaaacaatacaaactttagctgggcatggtggtacacacctgtagtcccagccactcagaagtcaaggttatagtgagatgtgatcgcaccactgcactccagcctgaatgatgggagaaagaccctgtctcaaaaaaaaaaaaaaaaaaaaaatagcctaaagagtcataactgctggtactttcatagtgaattttgattgcaaggtgatcagtatttgtgatgtttgtccttgttcctggccaatagctcaatcttggagccacttttggagcgcagggcctcgtcaggtgccagagttgaagatctgtcccttagagaggagaacagcgagaaccggatcagcaagtttaagagaaaagactggagtctgagcaagtcccaggtcattgcagagaaagcaccagaacccgatttgatggtaaaaaacagaaaagaaaaaaagaaatctctggaggcttgcccccctctcccctgtacccaggcatatcaccatcccctcccagattgaagctgggctatggcttgtttcaggactcagcagcctgggttagtgtcaggtcgcagattgtggtaaggaaagcacatacctcatgagaagttcgagtctataaatcaacattggtgaagatcttgtacccacaatgtaaacatgtgggttgatgcttagagctgtcgttcttgccactctgtcccctgagtcaatccaaacattgtcatttctcttctttaatttttttaaaaggtacttttccttccatatcaagttgttaaatgtggcaagaccaccttttcctgagaatcagggtggcttatttccaacataaatgacacagcccaactgtgatcagaagaatcaagtctgtggccattcagaaaataatctgtggttcagtggttctagtcagtgcctgttcggtgttgcccatcatatgacaatgcttaaaaatcgctccttcagttaagtccttttccaagtgtcttctcagaagacaaggctgttgagagcattgttgagctcagccttcctcaccgtgaaaatgttttgctttttctctctggtcctagagcccaaccagaaaagcacaaaggccaaagagtctccagttgatggataatcggctatcaccatttcacggttcttcacctcctcagtcaacacccttgagcccacctccactcactcccaaagccaccaggaccctaagtaagttttcctgtattccttatagtctttttactagggaatggagtatgtttatgcatctgggcagtttgtaactaaaccagccagaatgtatgtaagaccattgtaaaactggttcaatttcgtgttcgtgtattatacagttagactggagtttggcaaggaggccactaggactcattaaacttttctggatagtgatccaaagggcattagtgtcagttttataattgtgaaggtataaatgaggcagatctgcactaggactagacagataacaagtaacttacaagctaaccattagttaggtagacctgaacagggacaagaaatagacccattccatctactgcttatagtctggcttggggaaccagcagtgcacaacacttgagaagaattgcaaagtacccatagtccagaggcatggtagagggataaatctatcgagccagatgggagacaattgtcaaccaagagttagagataatcagttacagtttcctggaggaagtggatattttcctaagcacttgggctatatcagagaacagaataataccatacattccagaaaatgttgtcatcttcagcttaatactaaaaccctgaacaaaaaaagttttggccaggcacggtagctcacgcctgtaatcccagcactttgggaggccgaggcaggtgaatcacgaggtcaggagatcgagatcatcctggctacagtgaaaccccatctgtactaaaaaatacaaaaaattagctgggcgtgatggtgggtgcctgtagtcccagctacctgggaggctgaggcaggagaatggcgtgaacccgggaggcggagcttgcagtgagctgagatcgcgccactgcactccagcctgggcaacagagcgagactccatctcaaaaaaacaaaaataaaaaaaataaagtttttgcttcagaacaccttgtggagctcttgaaacttctggcgagggcgtcacctgtgtgatgtggggtaagaagtcttcttcgttctatccgcagaaaccatagaatgtggctttcatcagttggttgaccaggttggcttaggtgttacagtgccagcaacatttccatgagcttccttgctcagtgcctctctctgccgcctgcactttctgtcatttctaggctccccatcgttgcagacagatggaatcgcggccactcctgtcccacctccacctccccccaaaagcaagccctatgaaggcagccagaggaactccactgaggtagggaaatcacagctggcaactgtggccagggagcgccactcctgggaaggcagcatcaggttttccaggctctttagtgggcaggtttgctcatagacctgtcactgcagtcgattcttggctcattcctgaaaccacaggagatagagaagttttcaatgggaaggacagacatgcaagcagatgatgaaggtagaggcaggtgttctctgtacctcgtcctgggtacctgtgaaataagccgtgagttctagttcacctttttaggggggcgggggcagggtctggctctgtcacccaggctggagtgcaatagtgcgatcatagctcactgcagcctcaaactcctgggctcaagtgattctcctaccttggcctctcaattagctgggactacaggcatgtgccaccatgcccagctaattttttaatcttttgttgaaatggggtctctccatattgcccaggctgatctcaaactcctggcctcaagtgatcccccccacccacctcagccttccaaagtgctgagattacagatgtgagccactgcctgcccccagccctctatttcacatttgaagagtttacttcttctgaataaaggacagtcattctggagtgacctcagatgggtttccttcagtcatttaacaaatgacttttaagtgcctcctgtctatacgccaggaacccaagtgttggggatatggcagcgagagagagagagaaaatgtgtgtgtgtgtgtgtgtgtgtgtgtgtgtgtgcgcgcgcgcgcacgcacgcacgcacgcacgcgtgtgtctgattagctcatgggaaacaaggaggataagtcagtgtagttttccatttcactttgcaaagcctgtgtagataaactcagatcaattagaagctaaagcagaatatgagaaataggaggagaaggcagaattgggaagaaagctaagacctgcttctaattttgtgtttctgcttctgcagctcgctcccccactgcctgtccgaagagaagccaaagcaccaccccctccacctccaaaggctcggaagtctggcatccctacttccgagcctggatcccagtaaggatcttgccctccctgcaacaccgagtgccttagacagctgctgcctgagaactggcctccagccggtgtcctcattccatggggctccctgctgactgcatttcctgatctgggatgatgtttaccagcccaaaaccagtcatgttcttccaaaagcttctctttgatagaattttgaggccatgccacctcccttccagtccacatggaattccagaatcagtcacagcctctgattttttccaagaagagattgccttcaccattgttaaatgtcagcctgtacggcagagacatggtggtctgcacaagcctggacaagttcttccatattgatggtggagcaacccctgtaatctactccttggaaggattttttgctttgcttatgaaaagctgtgcttgagacttaggtacttttctcacgtggacacactgatcccatcccatattgcatcttggaagagatggatatcaagtacactttggtagctgaaataatcatatctttctgatgtctattgtatctcctttgaggaaaagaacacacatttttaatggagattggctgctttcaggtatgtgtgtctatcattgaaagagcatggactcaaacatcagccctgagttcttgagtccacccaactcccatcttcttgtggcacaggaaagctgccctctccctctcccaccacactcctgactaatggccttcactgcgtcgcagtcactccttccctacggacttctttgaagctcttccttttgcacatacggctttttttttttttttttttttttgtcctattacctcctctgagcgcaaatcactggctacaagggacttaccagtctggattcagcagtttcttttctaaaacccatttgggtgactcagcagccgcatctgctacctgattttatcctggagaatacagtgcaatatttctctttgattatttattcctcttgattgtggaattaatttgattgcttgctaatggtactagtagtactcctttcagaagaaaaaatggagcgatttaggtgaccaaatattacatacataaatagccacatgaagttttagacgtttggacttgaagcctcaaagatcaaccaaccagtccccttatttagtaaataaggaaattgaggctacacacagaaaattgtgctacagattattactaataacccagcttgctaaattaggctatacctaggtaatctctagaagacaactctgacagactctttaatatttacccctggttggaacaatatttgaaatgtcccagatatttctatgctacttagatatttgtggcaaagcagaaagctttttgactgtgaaggcagaggtcagcactgggggaaacttgctggtggtctctcccacaaccttgcccagagtcctttccactaaggaggtgaagagaacagagaaagagatttccatttctgctgccagagctggtatttgcctgcctgattctctgtgtttcctgtttcaccgccaccctttcaggagagaactacaccagttcatcatgagggtcagggaagcaaaagctctcagatgtgtccagggcgttacttaagaaatgagtatgcagattctggaaggggtgtggaaaaggtgatcctttacccccacccaggaaaacctgcattgtgctagcatggaagaatcatgggctttggaattaaacccatttggtggaattaaacccatttggtttcaaatcccagttatgacatctgttaactttgcaaactcacaaaaattatttgaaattatctgagttttcattttctcaccttccagaatggggataatgcctcctgcatcggttgttgtgaggtttcaatgagatgaaatatgggaaagaagaggtactcacctgatggtccctgctttcctctgctaggcctgagtaggaactggaactctctaagagcattactcatactttttttttcttccaaggtagtttggaatgtgagtgcaagttagttctgcacatacagcccttctccaaatggtggtttcctttgaggtcttttacatgattatttatgactagagacaaacttaataagaactcaagaggattttaaatggagagaactcaagctgtagagaaaggaggaggcaacagacaggatatgtaggggcttacctagagcctggcacgacttctgagaagtcacccagcagaccggctagaggggatttgtgtgccacactctacttgccgggctgccattaaaatagaaagatataaaactgggtcaccaaaaaaaccaaacctcaaggctatccttccagagcagtagaaatgagtcccacagcctggtctttgagcagaggctgggaagataggatacatcactgtctggataccttctctttttaatagaatatattccgtatgattccctttccaccttaatggaaataatagctctctcctgcctgaacaaaagggattccaggtagtattgtggctaagagattacagcggacgatggaaggttcattttttagggaaggtgttgggtaggaagagtcacatttgacagaattcataaataatgtgtcctgaagtcagaggatgactgcaaagaaacacctcatgattccattaaatataaagagataaggagcaaggaggaaaaaagagaaagaattggtctttatttttcttgctaagaactctctggagtattgaaagacattgaaattatccctaaaattgtcacaacttttgtgaatactggtatacggttggaggtgtttttaaatctttatttcctctctttctttgttctagtgacttgtcttgctttaagattttttttaaaggattgttttattcaacatatatcaagttcttatggaatgccagtcatggtactagccccttgggatgtagtggttgagtgtgttcaatggaaacagccccagtatacaaagacagttcactctggtgtgctgtaggattggaaagggagtggtaccagatgaaaatgaaaccctaaagaagactgctgggccatgagttgcttcctcctcctccaccttaaccctctgattccagaattgcagtcattttcttctgccaaggaaatccattaaaaactgcagccacactgcaatttcctaatgtagaacaagatataaagcaggctttgagacaacaacctacctttgtttactctttccaagctggaagagtccttctcctctagttgcccctaggtcactggctaatttattttaaaatttagatggaactcatgtatagttaagtgcacaaatcttagccgtgcagatgggtaattttcacatagctatttgcccacatccgtgcctctaagatagagacatacactgttttcagcaccccagaaagttcccacatgcccatggtgccattttgtgaaaggtatttataaggcccttcaaatttgtggcttcctttctcatacttctcaggtataatgaaagggggagaaaaaccccaccatcaacacaaaacaaggctataaagactgtgcaccttttaacaagtcaatttgtagtcagtccctgggcctgtctttttttttttttaattttgaagctacctgaggtttagaattccttcagccctagctgcttttattctgctttttatttaaacaaaaagagggggaggatctgaaggaaactagttttctgtacaaaggctttgaggtccatggactatacttgtcccatttatcatcccaggtggtgctttgaccctgccataccctggctattaagataaaaagatttgtggacattaaaattatgaatatgtcagtaataatccagcacacattgaaatattgacacagattaccataatttgtgcaacatcttataaacaatgtcatttccatagtagtctaaggcttcaccagcctggcccactgtatctagactttaggttcattttaataattatgctttccttctctgtatcatttgggaagttgataaatatcacttccttagataccttcattcagtgatatatctggcttttacaattaaattggaaaaggtaagtttctctttggtgggttgagagttggaccatcaattctaatctacaaaaggaaattcatgatttcactctgacgcctaggatctagccaaggctggtctgcagtatcagatgtccaaactcatctactattagccatattttgtgagtcgtttgtctaaactttgtcaaaaatgcctttgccatgattttgttgctatctggatttcaaacatggacagttaggaagatgtgcattgaagtaggaaaattttgttcagatttgctgttatttattttttaaattaaaaatggaaatgtattttaaagtttattgtgtgtttagtttgttattgcccttaagttgatgaaatcattcctgaacttggcagtttttccttatccatgcctccttcatgacacatcacacctagcatttttctggcttgtttccttacaggtcctgttaggttaaacctgcactgtggggtcctggagtcatctttgcccagaaataagaaaaattacaaaccacttgcttcctttcaccctatctatttttttttctatctaggctgacagttttctgatagcaattcatttaatgtacataggttctgtttctttacccattccccatagatatttagacaggtaaagagagaaataaaaaggttaaaggggatatctaataacttacatgaaaaggataggaactggttctaaaatggttgaatgtttgtatcacctggggagaggccattcccagaccaattacatcagaatttctgagggtggggagtaagatcccaggcatccatatttctttaaagtccctcccaagttattccaatgctagaccaaggttggaaaaccaccacataaaggaaatgagactttagaaaattggtatttaagatgtgtttcataaaatccctgctggtggtgggtcaagttggagagagggaaggggcagtcacacctgtattagcaccactgtttagtcctgagcttatgcttacgattttttttcccccaagaaagtgttctgtccaggagctgtggctcaagcctataatctcagcactttgggaggccaaggcaggaggactgcctaagcccaggaggtagaggcaacagtaagccctgatcatgcaactgcactccagcctgagtgacagagtaagactctgtttccacaaaaaatttaaagaaattagccaggcacagtgatgcgtgtctatagtcccagctacttgggaggctgaggtaggaggatcgtttgagccctggaagtcaagcctgcagttacccatgatcatcttactgcactccagcaggagcgacagaggccccatctctacaaaaaataaaaaaaaattagctaggcatggtggtgcgtgcctgtagtcccagctacttgggaggctgaggtgggagaatcacttgagcccaggaggtcaaggctgcagtgagctataattatgccactgcactccagcctgggtgacaaagagaaaccctatctcaaaaaaaaaaaaaagtgttccagtgctttgctttttagaagcaataatgcttcactgtgttcatatgatttgtaagagtcacgcttcttgaaaacaccacagcgtttgggccgtaaatactaacttgacagatctgggtaatcttttggctctaggatccccatagagaaatactataaagtgtcttcctctgtcaaaatccaagtgctattatcttatgcagtgattcttggcttttttccagtcatctgtaagctactgcaacttctaaaagttttgctaaaatgatctatttttgaaccattttttttactacttgatcatttaaagccatatgtatttgagaactcatctcattaaatgtatcatttgatatgtttccctaccctttattatgaaaggcttaggattttttttttcttaaagctacattgatgagttagactcttcagattcagtgtttatgatttttataaggaggccattttcattttcaaaatggggtctcactctgttgtccaggctaaagtcagtgttgcaatcatggctcactgcagcctcaaactgggctcaagcaatccttatgcctcagcctcctaagtagctggaactactggtgtgagccaccatgctcagctccaaagtggccattttcactctcctccttcccgttagttatttgggccattggagcatcaagggtacctcctgaaagcctctaacatcagcatcaggcagttggatgagcatctttttatcccattcaagggaggcctgcagctggccctcaagaaattgtcccaaagacaaactttggctaaggaaatctgatgcttcacacaggatgtgtaagttaagtgggtgtgttgctttttgttaatgtgttaagtaatgtgaagattgtatactgttttcattaaaaaaaaagtcaccgggtaattggctaatggaagcctctcatcttgctcacatgtattgattaatgaaataatgcagttttgcttttgtttcataaagcaggttgtggatcacatcattgcctaattttattaaagacggagtgaagacattatttgattccactttagagactcttccaatggaggtatttgggaaacctgtcattgtgcagtagcaaatatttgtattaaaaagaggcggttttcccccacgggatgtttctcacccctgttcaaatttcttagcataagtctttccttttttgagggagcagggtagggggtagggaggcgagttcatttgattaaaagaggaaaaagggcttagatctttgacaggtcagtttgttactgagacattgggcaagttatctgaaatttgtttttttttttccaatggtctcatagccacttggaagttatgtggctaaatgagaacatcaatgtcatagtgtctggggccttatggaggattagtcattgctaaatctacattgacctatgaaccctagtttcctgtttcagctccaatggacaaaataacccagcctccaaagtccagttctgttagctgctcatcatagggcaatactagaatagtgaacatggaaccaaacatggctgggtctcttaaactctctgagcccgtttcctcattttaaagcaaaggcaatactaactacaatccaaggttcttatgatggttagtaaaaatatctgtgcacatatgtagcacaaagcctgcccctggtctttttggagaaagaatggtggcaatgctatctgaccaggggacataggaacaatagagtcccatctccaacggtctgtctgtactccattgtgtttcttaaatgcaaaccaaacagatcaagcagatgaacactctattattttttaggtctcagtcccaaccctcagtgtgcaccacttggatagattgcgtgggaccagaaggagcgctggactaggagtccttggaggccccctctccttacccccaggcctcatttgggttccagtaaactttcaaagggtttggagacgatcaagggagggaacttctttccaagtggaagaaagccttggccgtggccccacctcaacttctgaagagtatggtcgaagataaagttataatcccagagaaactggagctgaatcagctttttctggctggaccagtatgtggctgttctgcttgtgggtagatgcagggtatgggtgctggagagcctgagatcccttttgtcaacaacagacactttatcttacctgccctcccatctgccacctgtatacacacatggagggctccctttggtgggtttacagtgatccttcccccggagttctgagttggagaaagatttaacaggtatgccacttcattcacaacacagcactttattatggaatatgtgcaacttggtgtaaggatttctgaaattcataccatttacaggtatttaatgggttataaattttcaatgtcagaattatacttaagtcatgttagtaatggtcattccttctggcccaatggatttaaatcttcttctgcccagtttcctcttcaatcagactttcctgaaaaatatataacaaatatatcaagactgactttaccagctgaatttcattacattttgacattttaatttctaaaatatcagtctggaaggaattggtctgtttgattttgtgctctagttagtgctagggagacatgataaattgggtttgtttttctggttttttttttttttgagacagaacctcactctgtcacccaggctggagtgcagtagtatgatctcagctcatggcaacctccaccttccaggttcaaatgattctcgtgcctcagcctctctagtagttgggattgcaggcatgcatcaccgcatctggctaatttttatagttttagtagagacagggtgtcaccatgttggccaggctggtcttgaactcctggcctcaagtgatccacttacctcggcttcccaaaatgctaggattacaggcatgagccactgtgcctggccgattgggtctttttaagcacttaatatacataaaatctacattaatagtttaaggatgagttgtgaggaaggaagtgaaaaaaaagtctggtcaattactttgctattaaaccagcctttgcttcaatttcttcataatgtcatgtttgacaaatttcactgcttgccatttttgtaatgcagtaagcaagattagaaaaagaaaggaaataggctgggcgtggtggctcatgcctgtaatcccagcactttgggaggccgaggtgggcggatcacaaggttaagggattgagaccatcctggccaacatggtgaaaccccatctctactaaaaatacaaaaattagtccagtgtggtggctcatgcctgtaatctcagctactcgggaggctgagtcaggagaatcgcttgaacccaggagatggaggttgcattgagccgagattgcgccactgcactccaaaaaaaacgaaaaaggaaataacgacgtctgcccacttttttctttgttctgtgggtatattaagttgaagtcactgtagacaattaaaattacagcttatttttatatatgatttatttgggctttcccagctcctaggcataactgatcattaactgtaatgccttctgattgctgcagataagtggacaatagagatcagagaatatcaacattgaatccaagattcaacttaagtcaggcacagtggcttgcacctttaatcccagcactttgggaggatcttgaggctgggagtttgagaccagcctgggcaacatagaccctgtctctacaaaaaattaaaaaataaaatcagctgggtgtggtggcaagtgcttatagtcccagctactagagaggctaatctagtctccagaattgcttgagcctgggaggttgaggctgtggtgagcattgattgcaccattgcactctagcccggggaacagagcaagatcctgtctcaacaaataatttttttaaaagattcaatttatacattcaattctctttatactttttcatcaaaaacctaatatgattagtgtatttccattttggggggcggaatttggaggtgattattgtcctatcaggaaactggaaatcaagtccatcactctctaaattataaatttagtagtttggcatttttcattccaaagaagagaaaaaaaaacccatctacagcagtgtttctcatgtctctattccccaaggttctggaaaaccatgtaagataaagcacagttgcaggatcaggtggagggctgtggagtagcctggagtggagtagtctagggggtttggtgattttacttgaagaaatgaaatgcagcagtgggaagaaatttgttttgttagttatcccaaaagctagaaccaggattaagagataaaagttacagagagatttcaattcaacttcagaaaaaacaaacaaacaaaaaaacgtttcagcccctagtgctgtctaaccaccaactgggattgtcatgaaacacggtcctaccacaggaggtaacagaggagtcaggaatgtaagccccacagtatctgggaggtagctgtcctaagtgatccccaaaggcttatccacctctagagctctatgctgtgatcatgttatgatcactttaacttaccagagctcctttcaggtctcggaggggagaacgtggctggtgcgtggtgcattcgaagcgttgggtttctgccagttgaccaacctctttgactatctgaagaaagagaatgtgatgctttgagatggagataaagaaatgaaatggtgttttccatttccaccaaaaaattgtggagagtggggtcaagggggatgtggggctgggggagattgggaaagttgcaggattagcatagggactttaaggacacagatctgccatctgacatttctactgaatggcatggggatctggagataatggagacagtaagaagatatcatattttccccttaaagatgaaaagagggaggcactttgagcctcatgagagtcagtatacccaaaaaaacaaaaagcaaaaaacccccaagagtttatagttgtaaaaaaaggttggtttttattttctaggttttactaaatatgttatagttcaatgagatttgcttcatgtataacctgcagagaagaggcttcagattctgggtcttctttaatactaaattatctttattatttctcagaaaagagataattccttccaatgataatgaaatgatttaaaatttttcccattctcagtcctaggttatttttcaggttaatcagctaacatagatggcttctttccttacatgaccctgatgagtggtcatattttataaacaaaaatcctcccggcactttgggaggccaaggtgggaggatcccttgagcccaggagtttgagaccagcctgggcaacatagggaaaccccatctctataaaaagttttaaaaattagttgggtgtgatagtgcatgcctgtggtcccagctatgcagacggctgaggtgggaggatcacttgagcccaagaagtcaaggctgcagtgagctgtgatcgtgccactaaattccagcctagataacacagcgagaccctgtcttagaaaataaccccaaaaaacaagaaagcaagtacctcacgttagtgttggtgccagtcctataatctaatctatatgaatttaaatcagcatgttttctactacgttatcttatcatcttgagtttgctaattcctgtattctaccagtctccaactttgcttaaatgcccctatcagtgaaaagaaattatagggcatgcatccttgataaggatactcatttataaattataaaaatgtactgatctaatagcatagatatgtttaaaagatgaaatgaggaaaaaaaaaacgaagttctaacgttttttccaaatcccaaagaatcatcttctgatacagaccttgaccctatcccattgtttctaattcctttagcaatcccatacactcagagtatgacgtgctgtctcacacttgttgctattaatatattcttttggaatttttccagctctttgtttagtccctgtgtgaactgaaagtaggaatgggacttctactttgtaagtgccttatctcacctggagcatctagggtacaacatcatagaatattgacattggggctatcctgaatgtttaatatagttaaattgaataaaatcactatgtcttattttgaagctgagagaaacttacctcttggaaagaatcaatcaaattttcggcatctctctttcctccagggcgcagtccataggaccagtgctggctggagcagccttccacgcaccaagtcagtagaataaggccagctaggagtttttgaattggcttcattctaaggcacatgaatgcacaatcaaattagatccagacaaggttgagtataaactaaaagacctctttagtgaaaaagctagcatctgtatcactaaccctgcagaagatggaagtcagagtcagtttttacatacagacactgaaactcagagacacttgctggcttgcctttagtttcttagccactggggacaaaatgagtacttaagctcacatgttcaggacctttttagtactaaaatagtctatacttttatttttattgtttggttatccaaaccccataattcatcccttatcaagttcatcattttgccttaacatttcccctgttgtggattggtcttcaactctttcattcctgagataaagagaactgagtcatctgttaagaaaagtagctcctactaggaatctctggctaatataaaattgcttgacattacatggctaccccatggtactaatgacatttttctatttatccttcagtcttcctagcattactgctggctgaaccatctgtgggagagaggactcaacactgttcaaagtagttagtcccagaccagatgccttcctagccaagggggcctctaattttctaatgaaatgtgtctccaagttaattttcatttgatgggaaagaggctaaaaactaaatcaaacactggtcgataagctgtgggagtccccaaagcctggatctctgtggctggtgatggcaaggacagtgaaggacaggacatcattagataccgtcacacctggatttagcccttgggctgtcaaatgccctgtagacatacaatagcatgcaatctaaagaagaaaaactcgtgctagaaataatacaaagccttttacctgtttagaggcagagagccaaaaagatcccaatcttcccttgaagtaggttgagtactgtgacttttctgttttcctatcttcctttttatagggaatttttccaggacattgaaatctttcctgctggtaaattatactgcaaatggactatgcttttttttttttaatggtaatttttaaaaatcctcacataaagccctttaatggtgtatgtaattggaacaccccctggtatatctgttagatttacttaagtgcagccattaaaacctcagctaaaacttttatagctgaggacacaattcaaagagattaaaatccagctagattggattcccttgaggaaaccagcagacctatcaagagttcaaggaaaatagatgtcttagattaagtgaagtcaaatgcatacataacttccacaaaggaggctatacaacaaatataggacattgagtcaggatgtctgggagcttctggctcttggattcttcatttgtaaaaggaagggtgtagactagatggactagatgatcacagagttgcttccaattttaaaaatctgatttacaagtaagtgacactatataccaagtccatgtaggatcctaaatcagacagttgtgtgtttgaaaattccctcatctacccaccaggttccctgcttgacttaccttgaaagccttctaaagcatcaaaaaggcaagaaacatattctgagagcaagaccatattgagcagacttacatcaacagatcaactcatttcagtagatgcttattgagttaaatatgcaaatcactcttaagggcagtgggaacagaaagatgagaaattatagttatttaataaatagcaaatgtataagagcattcattacaatagccatgcaaagtgggtatcattatctaaattttatagatgttccaccccagaggtgcaaccgtggacgtgttatttacacaggacaagcatgtaaaatacacacacaaccattactcttaattacatttatttgaatacatggttgtcttcccctaatttacccctaggctgaaacctgtaatagtcaaagatcccatcttatttaaatctctcttaataaacccccggcatttagtgagcattcagtaagtataggtttgaatgaatgaatgaacgaatgaatgaatagaaagcaaaaagcttttaaccaggtaaggcctaatgctgcctctatttctgcatcaaagatatgctttatctgacacagaattaaactttcatgtataattggctgtaaatcctgttatattagctaagctgtaagatggctaaaaaaaataactggatatttgttcattttacagctgggaatggcaatttcccctcatgtaggatgctaaacccatcagtcattgcacagtctcctctggaataactacatttgcagggatttcagagtaaagagaaatggtgtcttacctaagtaaattcccttgctttgtccagccatctctgtggaggctgtccagtcctcatgataggatagagaagggagtacactttaaagtataactgcaaatagaggagaatttaaaaataaaatgtaagtatttgactttgttccatttaaattatttcatttagacactttgactcatgtaagtgccattctgacatgaagagtggaatctcatctcactacaatatgcaagtagggacagactgtttttcaaccagagttcattatggttgaatagtgctagtttaaattgtccaattggtttgtgtttgctgagagatgtgcctctaagtattgcttaagtagaaaatgtggtctctggataggactaatgaaatgagagttaagacttgtgatgcatattgtcaggtgaatcacttatctctgggtaggtaggcctcactggatttcttgtaggttatttctaacagttgggattaaatttttgaaaaatgttttgaaattattaagatgaacacagcaatattgtattactcagcattctctagagggacagaatacatacacacacacacacacacacaaacacacgcacataggagagtttattaagtattaactcacacgatcccaaggtcccacagtaggccgtccgcaagctgaggagcaaggaaagccagtctgagtcccaaagctgaagaactttgagtccaatgttcgagggcaggaagcatccagcacaggagaaggatgtaggctgggaggttaggcccatctagacttttcacgtttttctgcctgctttatatttgctggcagctgattagatggtgcccacccagattaagggtgggtctgccttccccagcccactgactcaaatgttaatctcctttggcgacacctttatagacacacccaggatcaatactttgcatgctttgatccaatcaaattgatattcagtattaaccatcacaaatatggtctatgaattcatccaatatgctgttgtccttaaagtctccattagcattgtcttaggtcacacagatctcaaggcaagagtcaactttgttttgtcttactttctatagcaccaaataggttatcaagccactatgcaattaatgagtttttgatattgaatgacaaacttaaaaccatttaaggattccatggttaggtcagtttatcaaaaagttaaatataataaattgggtttaaataattggattttatatttgtcatatttttttctaaatttgaaagaatggctttagagaaaaaactgcttcatcaacatcaaaacacctcaaaattattacagcgatgatctcataatatcactgaaatgacagatgaaaaaaatcttttcttgccctaatgtaaaatctcagcaggaagcacttaaggttaactcctgctgacatgtctaatcaggttgtaaaagggtttcagagaattaatccttggataaggtgctttatactgaaataatgtaaccacttttctttgtagtaatgaaccttttaattttaaaggtaattcttccttggggacttacttagtgcaattctaagttttttccatatattaaagatgatttaaagttgacatagggcagatttacagtacacataagagtcataaaatgaaatggagaaaatattccaagtcttgatttatgattgaacccttcataagaataattaatttacaacattttctaccagaatttccttgagactatagttgaaagaactagactacaatagatagtattgcttagttgagtaccaaattttattaatgcagataatccagctagtttaattttgatttaaaacctttttcctgtcatcccaacagctgtatttttacctatgtgtacagacatgtttcatctctagggttaatggaagttttactattttaacggtttcttccctccttaaaattctctatcctagttatcaggcaaaaaatgttttggggcatgctatttatccagtctaataaagctaactggtaatattcatcacctaaagagtgatgaatttaacacaaacaaattaaacgaattattggggaggcagtcttttcttttgttcagaattcataaggtttgtgttgttagcatggtgtatttttaaaagaatgataaaaataatcatgtttaaagaaataaatttactttaatggtactttcaaaaagactaatccataacaaattaagttatactgtatttcctttgctacccagaaccacagggctggttgtcaacacatattgaagaaatgtaagcaaaatacagaaagtgatgattttcaaaaggaagagaagaaactccttttcaacaaacactttatatcatttattaatgcagtatacattagatctaaaatctgcagtttctaagcacaccatgtttagatctttcagatccttctgcagttttaggttatttctacagaggtacctttaagtgaatgaataccacattctgtaattcctgaaaatatagtacagagtgaaatgatttaaatataatttaggcacatattgattatgaaaatagattatctctcaatacaatacttctctgtcttggtaaaaataataaagcaaagaaaataattcatttctgaagttgctttccttcacttgtaaaggtctgatctcctcccactatgcatatgtaccctttactgttaaggaaagctttgcatatgtagatatagaagaataagctacgtaaatactaaagatatgtcattctcccaaaggagacacaggtggttttcaatgattccttgcctcatgttgatgagtctgtagaattcagaacccatttggacacagctaatatccctgctcttggggtagaaaataaggacaccaagtcattggtagggaggtacaggcccttcctctgctgctgcagagagagaatgactcaagaaaattgggctaaaatttgtttaaaaaaaaaaaaccacaaaaaaataagtaaaagaatcacaggtgctgactgattgataattacatcttggaccagccaaatgcctttatttttacgtctatttttttggtggctgtaatcaaatgtgtgtttaaaattcctcattccccactgtagggttctagctgcaattatattacattgccttttagcaggcaactctaccatattcactcatataagctttgattgcagtagctctggatttagtatctatttctaagctggccctatgtaaactatttggtatttgaattaaatgaatattaatgatgcaccttggtttttttggttttgaagtatcttcctatgcttgtgatgactgtatgagaaaactaggctaatagtgtaaatagatagaattgcttgatctggtgttgagtggaacttgcctagaatgaaattctgagaaattctcatttgtaagtgttgtagtgataggtaagttattcctccatccagagttacactgtacctttggaatgacagtgatgtacaatgatgtctttctttccactctgtctcaatcagtaagaactggatattactttaatttagctactgttctgtcctaaaaagtaaacattataaaaatgaacctgaaaagagtcttagggagtctgatctcaccatattcatacggtgtgacaggtatttaaagaggggaggcatcactaaagctatttataaacctgaacaaccttttccaagttttcataaagttttaacaatttaaatatccatactgcatctaggaattcaataaatataattgcatatgttgtgctttccataaattaaaatcctcaaatgcatctcaaaccaagatggtatttccacatcatgcctatttaaaagcaaatataatagatactatgcctggtcataaaaccaggtaaacccccctaccccattcaaaaggcagcaatatctagtttccctacatctattaaatgagtgcttttctgttaaaaatcagaatatggaaaaaaagtcagttttttcccttatgcaccactcaaaacaagcataatcctctaaatgttttttttttaaatttccttacagtgttatttcttctagacaactgagtgggtggagaaagaaaagtgataaggaaaacattttcatcttttacatcttcctccagcccctaaaattctcatctgacactttgtgacatgtgtagtggtgtcagcatctcttcaaatatagctcccttcacgttggaccctctcaggttggcttcttgaagatcacacccagacagatcacaattctgcaagatgaaaacaatattcatgtaattcatgtggaaatttcaggccttatctatttctgctcaaaatgatttctggggcagattaggaaaatgttcttatacaataaaactcagttaatttccggaaaactgatgatacaccaccctaaattaagatgttcttctatctttatttgttacctctagttcaggctgatcaccataaatatgtataaacaaaggttaaagaggaagcatgtcccttgttcttgcatattttataaggagacattgaaaacaggggtccccaacccctgggccacagactgatactggtccatggcctgttaagaatcaggccacacagcaggaggtcaccagtagatgaagcttcatctgtatttacagccagtccctgtatggctcaagttacagcctgagctccacctcctgtcagatcagcaggggcattagattcgcacaggagcgtgaaccctattgtgaactgcacatgtgagggatctaggtggggtactcctcatgagaatctaatgcctgatgatctgtcactgtctccaacacccccagatgggactgtctagttgcaagaaaacaaactcagggctcccactgattctacattatggtgagttatataattatttcattatgtattacaatgtaatactagtagaaataaagtgcacaataaatgtaacgcgcttgaatcatcccaaaaccagcccccgactctgatctgtgaaaatattttcttccacaaaaccagtccctggtgccaaaaaggttggggaccactgatttaaaatacagaatggattccaacataataaatacacacacacacacacacacacacacacacacacaattttttttttgaaacggagttttgctcttgttgcccaggctggagtgcaatctcggctcactgcaacctccacctccaggattcgagctattctcctgcctcagcttccagagtagctggggttacaggcactcaccaccacgcctggctaattttttctatttttagtagagacggggtttcaccatgttggccaggctggtctcaaactcctaacctcaagtgattcgcccaccttggcctcccaaaatgctggggttacaggcatgagccactgcgcctggccccaaagtaataaatattatcaaaacaattttactatgatccaagaacaacaacaacaaaaggaatgagatggggggaagactttttttttaatctgaaaagattttacttaatcaaattgtgtaatagatttttccattccctagccctagtatttttatagcaaggaactgcccttctttttaaagccccaaaggtacgtatataatacagtgagtttgacagatgtacagaacagtgtaaccaccgcaatttgaagctatttcttaatttgtcttgagatcacggagcaataagatagagattccacttaagtccctggatatgataggggacaatggttagagagaagggtgactaaacgtaacctgttaggagaacaaatgtcagcagctctcccctcaatagtcaacctgatcagtctttgcaatcagagagagggaggcttttgctgctaggccacactgagtacacagtactaaaaccaaggaaaaaaatataatcttaggtgaaagtaatgtaacaaacaataaataattgtgctcgtgataggattatacttaggccaattctttttgccttgaagttgaaaggggcctgctactctgctaccgagagctatcaagatatctaggcaaaaatattatgaaaaaacattaacagcaagctaaattttgacataccgttctctgctatccaatttataccagatttcatagctaccagccacatgtggctacttaaatttaaatgaattaaaattaaataaaatttaaaaatcaatttctcatttgcactagccaaatctcaagcgctcaatagctatatatgggtggtagctactatactgaacagcacagatatagaacatgtccctcctgcacaaagtgctattggatagtgctgatatagacctatcaacagctatcaagtctgctagctaaactggcaaattaagaagacatacaaatataattctttgaaaaagatgaccaggcaaaattataatctcaagctgaaaaccaaaaaacatatggttccaatttcaaatagacttttcctgaacctgatttcaaacctggatatcatttaaatttctcaagtagtttaagaagtaatctagcccatttaattctattcggaattaaattttatggaaaatgcaatacattagataacacatctatcaaacttatttacttgagaaaaactcaaggaaaaggagagaaatgaaatcaacttagactgaatgtcagatgagtcttccaatccagttttaccagccaactactttgttttgatttcaataaattttgcatgagatgcttagtaagtctagagtaataaaaattcttaaagtgttggtgaactcacctctaaatcagttcctgccagagttgctcctctgaggttacagttcttcaactttgcattttttaaggtagccactctcaggttaattcctgtcatctgacttccttccatatccacacctttcagattagcacctacagtgaacacattctgggagtagtttaacttaaaaatatagttatctaccttcaacagaactgcaagatgacttaatggaggcctcttttaacttttggaaattaatctaaaatcttgtctctcaacgaacttatatatataaacagtttactgatgaaagaatgctttcacaatacttttgagggaagaaatttagttctgtcttatgatagttagcactttcataatatgcctctacaggtttatgataagggagtgaagtagtctcctaaatatacaagtaaacaaagtgatcagtcacagatagtaacaaattaagaaacaatacattaaatctaaaaatgatttttaaaaactccctggctttatgcaaatgaaatttttccttttggtcagtgtaagaatattttattccatttgaaagtttaagatgttgatatttaattttccaactaaaaccttattaaatatttgaggttttattttttctgagtcctcaattttgattagcatttgactgaaaccaaatggaggtttcttaccactttggaagttctccaaatatgatgacagaagaaacctatcccctacagctatcctgtttcacccttaacaattattttccagggcttttttcctttacagtctgcttccttcgtagaataggtatttacagaaaggatctcaccttctaaattggctttaagaccagaaggatcctcaaaattacacagtttcagggatgctccttctgcattagaacagagcatcttgactccctggagattcgcacactgcaaagaaaagagaaaagtcctggttgtaaggttcataattttgttcaaattagctcaaacagtaaaagaaaaaaaatagaaaagagggaaaggctcaactcaaaacactcatactcaattttattttctgtttacaataaaggcttttctaattaaatacagtaagaactgggaacatttgaaagaaaaatttttttaaagaactgttttttaaaaaataaatgcaaattaacaatagcatgctcattttacatgaaacataacggtttagataaagaagttgggtgagtcagaactctgacacctctatctctatttttataaacatacctatgcatgacaatgaaacagtcaaaatgtatgggtaaggaaggcatagacttgttaggggtatggattttcttattactgtaggaatcttgatgttctaagtgaaattcttgatattctaagatgctactactgccctcaagtcagaggtcagaatacaaaagccagcatttaaaggcattatttagctagaaaacactaacaagatgctggctgggtctttctgcaccaaccatggctaaacattattaaccctgagcaggcacatcacaatgcataatgcagggcagagagtaaaatggtagaaaatatatgttttaagactttatttttttgttttgttttgtttgagacaaagtctcactccgtcacccaggatggagtgcagtggtgctgtctcagctcactgcaatctctgcctcccaagttcaagtgattctcgtgcctcagcctcctgagtagcttgaattacaggcatgcaccaccacgcctggctaatttttgtatttttagtagagacggggtttcgccatgttggctaagatggtcttgacctcaagtgatctgcctgcctctgctccccaaagtgctgggtttacaggcatgatccaccacacgcagccaagagttttaaattatgttcatttatctcaaagcgtttttgacaaacatctttttttttttgtccttaacacaaacaaagatgcctctcgacatttcactatttaaagattaggtccttcaaacgtttttttgatgttagtctttttcctgttttgctactaacctgacccttcatgataagacagaataaaggacagtgaaagtaactaaaatgcatatttggtagattttgttactcgccctgatacacagcttcatggaaaaataagctgcagctaatgagtaaaacccaaattagagtaattcaataaatgactaccaaaagcaagatggtattaattcaaaagacatacagacacgggccttggtggtaaggaacttaaagttgttaaaaattaatagatttcattgttggtctgcatatatcctctaacttcaaataaacacagataactgttataaatacatacatatacatatatataaatatacacatatatgtagagagagggaaaacgccactgagatgttaacttccacaaactgatgcataccatgtttatttcaaaatatctgtcaaatacttcttgagcagtaacattttcccattccagaaatgaggctgaatagatttcaaggttcctttcagctttacctttacaattagctgaaaatatgagtcctgataaataaagtacagtatattgaggagatcaagaactaattccaagatttaatttcttattagttactaaacctttcaagtctatgtttaataaaggatatcaaacctgtaaaaccaaattcatttcactttcagacctttagtcttatatcaacataataaattatctgttttcaagtaaaagctccagtaaaagatagttataattcctgtctcaaaggctctttgagactgttcaatagactaaacatttaattttctcttgtagcctaaaatgatacttacgtcaagcactgatccagagagatcagctcgttcaagatttgcacagcaaagatttgcatgtgcaagattacagcggcttaaattggccattttgaagttaatgtatcgaaggtccaaacgagaaagatcagcaccactgaagttcaaaccctgaaataaaaaagcacaaattgtcaccataactaaatcgtctgtttgtattaaatttaattactatagctaaccaccaagttttttttagaagcaattggcagttcagtcacttggagtttattacagaacatgataaaatggaacttagatacataaaagaagtgtccttaaataggttcctcataaaagaaactctatcaatatatacattagaatatagcccggctataattcatttctgtgtagaagcttctaaagagggatccctgttagtcctatacctgctaataagtatttaaacctaattatatttaaattattttattaattcagtaattcaaaacagtttattaggcaaaaatgagtactgtggtctttacaatttgaaatgctatagtacacataagtaaagtacctgccactgatcagcccatatattgcaaatgtacaaatactgacttttaaaaaactgctgcaatttctatgcattattcataaactgttgcatgaggtataattagacaatttaaaaaggctattattgcatctctttttcgttaaccatttcagaactaaatcaatgctatgactcataattaaattagatcttgcatgtaaaagaaaaacaaagcaagataatcccaaaacactagaagaatgtaaaattttattcatagatttgctgatagaaataattgatgtaaaagcctgctaattacctggcatcgcagttctgacttggttggagttgctagcaaaaatcggacaaattcctttcgggatattggtgaatgatcctccggtggttgagaattcttaaaaaagacattaagaaattagtggagtcttttgggagatagctacaatgaatgtaacactggctaatgtaaaaacaggcttacctttattgccacttctaggtgttcaatcaatgagtcaataccaaaaaatcttgcttcttctaacacacctatcagaacaaaaataattctgaaacaacctaatttagtgaatgtattacattcattttgaatttactaaaatacgattagttcacataatcttaacatttaattgcctttttaaatggagcagatctgaacaggtttgccacaagtatcttttacatactgaatcagaaaatgatagaaatgaataaaagtttaaaaagtacaaaaaagtcaaaagtataattcagaaatctgtcttataggagaataaattttaaaatatttgtaaatactaaaagagctttcatttatcatttactttaacttggtaaaaaaaaatgtacatcctttacatgacttggtatatttacttattctaatctgttaataaacatcatcagaatgtgtgggaatacatttgggttccattatctttcaaatgagaagacctcaatcagttggctgttgactcagtaaaaaactacttagaactctggaattacaaagaaagtatcagacataatccctcccttcaaacacttacaagctaataagggtaagtagatacagaaaaccagaagcagttatttgggaagaataatacaatcttttctgtgaagaccaaactctatggtcaacaatccaattgtaaaacaaacgtcatccaaggtacagcatcgggctaccactctggcatacagggtccacatttccccttcaagaggcatccaaagattatgccattccgttcggatatatatccctggtggaaactcaacatattataaaagaggttcttgtgggccacgctctcaatttgccaaggtctaagtaaagcagaactcttagggaatgcagccaggatacgtttccaattctaggtttagaattaaacctttaaaacatccagagaagccatagaaatacaaaagacaggccgggctcacacctgtaatcccagcactttgggaggctgaggtgggtagatcacttgaggtcaggagttcgagaccagcctggccaacacatggtgaaaccctgtctctactaaaaatacaaaaaattagccaggcgtggtggcaggtgcctgtagtcccagctactcgggaagctgaggcaggagaatggcgtgaatccaggaggcggaccttacagtgagccgagatcgcgccactgcactccagcctgggtgacacagcaagactccatctcaaaacaaaaaaaatacaaatattagctgggcatcatggtgtgtgcctgtaatcccatctacttgggaagttgaggcaggagaatcacttgaacccaggaggcataggttgcagtgagcagagatcacaccattgcactccagcctgggtgacagagcgagaccctgtctcaaaaaaaaaaaaaaaaaaaaaaaaaaaaaaaaaatctggatttgaatcccagctctgccactcactactttttggtgttagtgaaattactgtagattgttttaaagcatataattacttggggcaacctgtaggcaatgtaaagagtttggatggaaactgtactaactgaaaacaatgctttataaaatgaatccagcagagagctctgctttttgaacacttgaacaaataaatggttgagaaacatgaaaaagaaaaaactagcaaatcttggtaatagcttggtttgcagatgtgtgacacagcatggataaatatatttctgacattttctaggcaagtgggatacaaaatgctatcaataatttgaagaaaaattaaaatgggagaaatagaaagcaacaagaatttagttataaagttatagaactagctaaaagggtcaaataatatcttttttttttttttttgcaataggtacatgttcaagggaatataaagtttgttatagcaacactaaaagttaatgggtgttttgtatttcactacagaaactgtaagccagcagtcctcaggctgattctgatgtgttcagcatgtaatgttttcaaaacaaaaacatgtcacataaaattttagatacccaggttttctttaaaaaccaaggttctggcactctacgtctgaccactttgcacatggcaatgatctgctgaagctgacaggcatgtgacctcaagattgccaactgcctaccattcctcaagtactaacatcacatcaacttcagtcacttggaggcctattagcttccaaatatgcaaccagtgttttataagggctttgtctacatcacctccgtgaatcttcacaaaaatcttgtgatgtagatagggtcaagagtgcttttaacactcatttttccaatatgactcagagaaatttccccaagttagtctccctaagttagcaagttgtagaatcaagactctaattgagaattatgattgcaaggcatgatttgccctcttgactactctagttctcacataatgtggggaatatccagaacttggagccaagttacattcttaattcaatttttaaaaaaggaaacaacaaaatcctttaaagtcacttgtgatagaacgtaaatcaatttagaatataaagttgatgcgtatggcttacatatttagctatatgtacaaagactatctacctgaaggaccacctgcccgtgcctaaatctatttctacacctatatcactcatatacatgtgaaaacatctagtttaaaaaatagaaaaaatatatacttttactttatggaaatatactgttactgagtgaaacaaagttaaaatcttaaacttacaaaaatgtgagtagttacataattatattgaaagtctaaataaactcacccaataaattaatgccatcatttacaatgagctgtccatgacgcaagtagttcaaaatgggttcgaagtactcaggacttcggtcaattaagaaagctcctctatgatcttgcttatttccccagacacctgtgtcaccattataataaagaaagtcccccataaacaaaaaataaagtcagaaatgtatgaggaaaaaattgctaaatataagtttttactcttaaaaactgacataattagtaagtacagaaggtcaggagttataaagtcagcacagatataaaacaggtaagatgaaatgtgaaaacaacgtgttacactcacctttgtccttaaacatgtgggccagcatactgtcaggttctttattcactaaagtgctcctaagaattcagggaaaaaaattgatttctccatttgtctttataaacaaacatatttaagtcaagagtatactcgatcccagctgctctctcaaaaagatgcatgctacaacctggtaggagtaacgctgggaaacaaaaacgtgcagtaagttgccatttatcagatcccttctaatagggtacttcctttgatttaaacattgttttagtttcctttgctttaaatacttgtctgtctatcctgtaagcaaattattacataataatattcttgatcttccaaacttacatttttctgccctttaataaaagcagttgtagtctccacaaatttcagtagtgttaatttttacttatattgtgtgtttattactcaatatctaaaaagcatgtttttttttttttttttgagaaggagtctcactctgtcacccaggctggagtgcagtggcaggatctcggctcactgcaagctccgcctcccgggttcacgccattctcctgcctcagcctcccaagtagctgggactacaggcgcccgccactacgcccggctaattttttgtatttttagtagagacggggtttcaccattttagccgggatggtctcgatctcctgacctcgtgatccgcccgcctcggcctcccaaagtgctgggattacaggcgtgagccaccgcgcccagccaaaagcatgttctaaaacactgaagtgatgccttttatgctttctctggagtgaaccatgtttttttcttcaaaaaaagttataaaaaatggtttcagatcacatagtatatttaagcagcatttgagtatcttttaaggaaatcagcaaattgaagaacaaagggtacacagtgcttcttttgcattctctttctaacacacatacacacacacctaccgtgtagttgtaaagtaccgccctccaacatttaatgtcagccagtctgtgtggaatcctaacaatccctcaggaggcttagaatctgtctgaggatctagagatgacatgtagaaaataatacaaatattaagattggggattctgggaagatggtaatggcataattttttaaactgaatacacacataataaaagcataccagagctactaggacagcaatacccaaacccacagactgcatctaaaacaacactaggtgataaggtagtcccaccaataccaacagctataagagcagcatgctttcagcgcctgtgaaagaaaaagcagagagaagcaacagggtatatgatgaacccatgaatgttaaagccatccatagatactgacttcattgcttaataagtctagctgaaaacaacagattgagatcatcccaaaagtgggtgatgcaagtagtttgcagtaagatcttatagggctgaaaataaactcttaaaaccaaatggccaaaactcccttccatggacaaagccccatactgataagatgctgggaaaataatccaagttgaatgcaacaaagacaacagagacaaaaaaaaaaaaggactgcagatgaaagttaagaggtttaatagaccagaatatatcagaaaatgagttctgtgtattttaaacacttcacaaaaacaacagaaaagggaactctagagccatgaaattggaaaaactgtcctgtcagccctcttttcaagttaagaaaaactaatttcatataaaaatgagcaatacaaaaagactgatcaaatgttaatacaaaagtgttaaaataataattgtccttatagataatgaaaacatgccagaaatacccacaaaatagatcaaaattataatctaatattccaaaacatgctaaaagaagtttatacaaggtataaaacaacaatataaaccaggatttaaaaattcagaaatgagtagcaagaactcccaagagaattagaaataaaagaaaaatgatttttaaagactaaagcaaaagaaatacaagagtgattaaacacaatagacaatgacttaagggaaagaaaaggtaaaaaagagaatagcttgaaaaattaaaaagaaatggtcagacgtggtggctcatgcctataatcctctgggaggccgaggcgggtggattgcttgagctcaggagttcgagaccagcctgggcaacagggcaaaaccccaaaaccccatctctacaaaaaatacaaaaaaattatccgggcatggtagcacacatctgcagtcccagctcctggttgggggctgaggcaggaggatcacttgaacccaggaggttgaagctgtagtgagccaagatcataccactgcactacagcctgagtgatgaagtgaggccctgtctcaaaaaaataaataaaataaaaagaaaggaaaagaaagtttcaaacataaaagacaagtgtaaaagatccaccctacatacaatagagtcctgaaagaaggaaatcaaatcaaagtgaacaaaataaaaatgtcaacttcaagagaactgtactgaaattttaaaatacatacacttgaaactatatattgaaaggatccatcacatactgagaaaaccaatccagaacaactcagaacaccaataaatattctactaaaattactgtactttaaagaaagagaaatatcctttgggtgatctatgaaaaataatcacataagaaagatcagattttttgagaccaacacctcaggccagaataaaatgcagtaacatatttaagatattcaaagaaaaataatgtgaaccaaggatttttcaatagcttcactgaggtataattaacacagaacaagttacacatactaaagtttataatttaataagctttgacatataattttataccaaaattatataaagatggtggatggcaatggcatcttgccattggaagatgtcaccgaatattgttctcatagtatcttggagagaaatctactagagaacaagtttcagataaacactggaaacataacaaaaggactggaggtaagtgtacgcttgaagaagtaaaactaaatgagtgtataaagggagacactataatatacaatggctatatgttccgacaattcagaaacaatacaattatttttaagtaaggggagaagggatttagcatatgaaaaacatttaactgtttttagtaattatattggtactgaaagtattgagtttgttactctgacatttttagatgtgttctgtatggggtaaagtaaatgagtaattatgtgacattataattctattagtctccatgtccctgaaagtcaggactattgatatagaaaaaggagacacagatgtaagacagaagaggataagtaaaaaccttataatccttaatataaactttaagtactactatgaagccatgagttatttcatctatccatattttgttatatatgacatataaactttatatcctataacatacattatatacaaattttatctctacctatatattttcaattctgtccaccaaaaggcatagcaacaataatgaacccaatagcgaagagcctccctagcacccagatttgtcttggaatgacacttcccactaaaaaaatcaaggcttgttggaaaaatgttgatccaggtctgagacaggaaaaggttttaagatgaacaccagttattccagataataagaaagccataaaatccaacaaggtttgttaaaaagacccgaagagatttccagtggcaaaaaattaagaccatctgaacatcaataaatgcagaggatgaaaatataccaaatatttttaaatccatgagttaataacaataaaaaaaccttaattgatcattttttattgtgtttgtatgcagtggaccaattaagtgaccattgcctgccagtcactgttaggccaatggataaaagaagatgagaagttcttgcttacagttttaaggtagagacagacagacaagagtatgcacttacttctaagttgacaattgcctgtgcaacaatcgtgagaactacttccactcaccaaatgcaattagtatgatgctttaaaaaatacttaaatattcagagtgtggactgtatggatctaaataaatcaaatactttatcttcctttcggccttttcttttgagatatacaactataagctttcttccaaatcaaagggtagtgtgtgtgcacacctgtgtgtgtggttgataccaagtcattttttggctgatctgatcactgtgaaatactgtcaaacactacttacgcaagcaatatttactcacaaatatgtaatacaacacgtagaaaaattttgacattcaccatcaaagaaaaaattttcaaacaaaacaattgtttctaagatcaaaactaccttactatgttacagttaatgaatatgtatacctccagagcattttaacggcatgtaaaacatgcatctataataaactacgatcatatagtaaaaaatttactttaacatacccaatgcagaatcaaaaagtgtgaagatttgaatacagccataagatcatttttaatgtttaagcttaatagccccatttaaaataattgtcattccatcttttttttttttttttggcagataaaattggcttttaaagtcacttaccaataaatggctctccttcacaaacaaacaaaacatcatcatccctggggaaatcaaaatttaaaaagctaccatcaaaatctaaaaatcacattaattatctgttgcttataggaactattccttacaattatatagacaataggttttgctatcaatctagactgcaaagaagctaagtttccaatgctttgtttaaccccttgaacttaactgtctttgaatttaaattcaaaaataagatcttgcacatgaaagtacttttgaaatgtggggaaaaaaatctccttacacaaacgatgttgagttcagctttcttatcaattgagaatgaataattatgctgaaaggatagattaaagtcacagccaactattctttttttctttacattttttacccctaaatcatcagctgttgtgtgctttggagatgaaataaactgtcatattaaatctaggaaaaatatagctggaagtaactctactgtcagtgtttacccactacacatccaccatacacccaaatgtaaatggctgcacataacccagagttctggacaatcagtgcacatcctcttcctcaacccattaccccagatactgtattgtgaaccaaaaatgaataaacagatatcttatagctcagaaggcttcaattataaccttccattgtagacgtttttatttcctataggacatcacaggacacgttaaatttttctaagaagcagagttcgtgtttgttaagaagaaagttaggttgatgaggatcatcatccaacaatgtgactcagttttccttagaaactgaaagaagctgggagatacatattgaaaaactaagaagttatcctaatttatttggatttaaaatgtagtgtatagtatttcctacttgttcaccatgccagtttactttttcagattagtataaaaatctgttttcattaacaaaacccaactagctgtatgacctgagtgagtcctcagcttcacaggtaattcgtttcctcatctgtaaaatgaagggtctagaactgattaactgcaaagcagtatattatactgaaaggtcattttgatctagatttatacagagactttgtatatcattataggttaaagcatcattatcttcacatcactgataaaaaaaactcatgttttgccaattaaatggtataactcaggcaaagcaatgataacataagtggcatagtcaatacttaatttgtgttccctttaccatcttctttgttaagcatcttcctgctccaaaattctctgacctcatgaagatgaagtaaggtgaactacacacttgttttaaagagataaatctgcctgagatatttaaggtacaaacataagcctataattatggtggatcactggtgatatcactacttagaattctatcatatttataaagtttttacaaaatctggcctttgtaatgattataaaatgcaaagcattcttaggaaatgattaacaagcaggcgcatataaaagtgaagagatgaattagatttttaatgttaaaaactgcacgtcttactagatccttctctagtaccacaaagaagaaattcctcatagctatatatgaactatgcagaaagactatcagtatactgaaatgtactaagggttttctagctgatcaattcaccttaagcccaaatgatttaaattccaaagagcaaattctaggtaaacacttgccaaaatcctgtactcttaacagtgattaaattactgcttaagggaaacagcatagcaccaagaagttgaggcacactgttgacagcttataaaaaggtgaaggttacctgatcaaagcaatatcatcaatcagtccacctttcccattatacacactggtggcttttatgccgagtttactgctggccacagaaagcaaatcagataaagttccatatacagcaaccacctgtaaacacaccagaataatatgaacaatttctttaatacatgttatcccccataagttataaactaccacactagaacagtgctaaaaagattatcatataaaaggagacttcaaaaggttcttaacagtgcccccttttcttccatgactcatttattcacttggtgcctaatattgccgactcctcaactagaacataagaaatcatctctgaccaaaacaatctacaatcctaaggtgtgttaaatagcgctccagttgtgaagtaagatagacctacacttcgatctagagtctgacattttctagctgtcaacttgagtcaacctactgatgcttctgttgctttaactagaaatgaagaaaatagtagcacctacttcagaaggtattatgaaatgagttcatgcataagagcttagcaaagtgcctgagacctagtaagtccctattatgttgtccttttattatttatttatttgaatggttcatccttagaacaggagtgtgctggtactgtttattatatcattaacgacatcaactaccacagaaaagataacttctcacctcatttatttaattcttcactaactaagccagattttagcatctaacatttaagaacagagcaaacagctgggtgacaatgaattgatgtgtcctgctgtgaatcaagcagtctgatatatgtgcaagatacatgcaactgtctaagcagggtgctgagaatttctacatgtaagtgaattttgtgccctggtcctaactgtaactatgggttcccagcgactgagttgtgcagttgcaccattatcagttatgacctctgaaagttaggaataaaaactaggtaagggtcgggcgcagtggttcatgcctgtaatcccagcactttgtgaggctgagacgggcagagcacttaaggcctggagtttgagaccagccagaccaacatggagaaaccccatccctactaaaatacaaaaatcagccaggtgtggtggtgtatgcctgtagctactccagaggctgaagcatgagaattgcttgaacccaggaggcagaggttgcagtgagccaaggttgcaccactgcactccagcctttatgaccaagcaaggctctgtctccccgctaaaaaaagaaaaataagtaggtgaagagctaaacacgaagcacagtcagctagctcatggacgtcccaagatttattatgtcaagatgccatatgaagtgagcactaaggctggtcctctgtccaccagtgactggaatagagtggacagtttctagttaaataaatacagtaaatggaggacatggaaaaagctgctcgataacatacgagtgtgcagtttttcaaaagcagagtactcagattctaacttttttctcttggatcagaaggatgaaagccagaagagtgctggggcattttggaaagtgttgaaggcaagaaaaatttaagcggaaccaagtgcattataaaaaataatgtacaacccaagtgtccataagcaggtaattgcataaataaaatatggtatatatatacaatggaatattattcagcaataagaaacaatgaggccaggtacaatggctcatgcctgtaatcccagcactttgagaggctgtggcaggtggatcgcttgagcccaggagttcgagacctgcctggccaacatggtgaaacatggtctctacaaaaaaatacaaaaagtagccaagcatggaggcacatgcctgtagtcttagctgcttgggaggccgagatgggaggatcacttgagcctgccaattcaaggctgcagtgagccaagatcacgccactgcactccagcctggacatgatgggacggaaaagaaaaaaggaaaggaaaaagaaaagagaaaaggaaaggaaaggaaagaataaagaaaaaggaaaggaaagcaaagcgagaagagaagagacatgaattctgacacatgctgcaacatggatgaacctttttgacagtatgctaaatgaaataagccagtcacaaaaggataaatattctatgataccactcacatgaaagtacccaacacaggcaaattcatagagaaagaaagcagaataaaggttaccaaggcatagatgggaatggagacttatttcttaatggttacaatttctgtttgggatgatgaccaagtactggaaataaaccgtggtgatggttacacacattgtgaatgtaaacaatgtcaatgaattacacatttaaaaaatggttaaaataataaattttgttccatcttttatcacaataaaaaaaatactgcaaagcacttggcacagtgtcctacacacagcaggcttgccataaataattaaagcctgagtagggctgggcgcggtggctcacgcctgtaaaatctgcactatgggaggctgaggcggatggattgcttaagctcaggagttcgagaccagcttgggcaacacagtgaaaccccatctctactaaaatacaaaaaattagccgggcgtggtggcgtgtgcctgtagtcccagctacttgggaggctgaggcaggagaattgcttcaacccgggaggcagaggttgcagttagctgagatcacaccaccacactccagcctgggcgacaaagtgagactccttctccaagaaaaaaaaaaagaaaaaaaagcctgactaaaacatgtcccccatatttcctatgattgttcacctctgcaacacagtgaggtattctgtaattgcattatacacattcctgggacaaagcgaagcgaaatacagtacctagggcattgcacacggcaaagctggggttgtgttaaggcaaagagcatgaagagagtaaagacagagaagagagaagcaaacatgcaaaggagcaagagattgaccaaagcagatgcaaaacaactcctgcagtcagaaggtgctgtgaaaagagggtaagaagcacaagcacctctttcccaattcaatgttcttggcatagttgccatcatacaaagaattttctaaatctttcttttccctcttatttacctctggctcttacatctcagtatggctttcttttgcctgatatcccctccttgccctaacatcaactttctctctcagcatctctttcactgttctctcttggccataccaaaaaatagatgcaagttgaatgcacctgcctgtattatgcttaatacttaatgtaatattatagcttaagatcttatatgacttattcaaaatacactaacttgaattgtcgtctacttccatatgattgacttggtttttctgtgggtctattgtcttccgatgaaaataaaggccacctgccatgttttaaagctgtgctgtccagtgtggaagccactagcttcatgagtctatttaaattttaatctattaaaattaaaagttaaaatgcagttcagtcacactagccacatttcaagtgctcaactgccacactggctaattgttaccatattgaatagcacaaatttccatcatctcagtagttctattagacagtgccattttaaagagcagaaaaaaaaaaatgaagaaaaaaaaacacaactattttaattctattaggctttcccatgacataggaacccaaagtaacaaactgatgaaatacaactcaagacctgtttgttgttttatttagagggttgggatgttgccatcttctgtttcttccccactgaagtcaaatgtgaccagatgatagaaaaaaaccacacatactgcttggcaaggactattttcaaggcaatcaaagtacaacaggtatttccttgtaggctgtaaaactactaaggagcacagtctaggtataaattgaattcaacttttattgccacttaaatcaatcctaataaggtatcaaaaacaatttaccgtatcactaaatattttctaatctggctgtctgcctggatcctaaaggtccaataaaaaaaattaatttgcaaaaagttgttatgaattctgtgaatagaggtgaccaattatcccttggtaaagctgataagcagcactaaagaagtacattcctgagctgttctactaataaccgccataggttcaaatggtacattacctggcttacagcaggtctttgacaaatatttcttgaatgttgagtgttgaagtaggacacaccttttttgtgtgacagtcatattcatttaagtctcttacactgtcattagggtaaaaaaatacacagtataaatgcaattctaaagcagtctgggcatggtggctcaagcctgtaatgccggcactttttgggaggccaaggtgggtggatcacctgaggtcaggagttcaagaccagcctggccaacatggtaaaaccgtgccaccacgcccagctaatttttgtatttttagtagagacggggtttcaccatgttggccaggagggtgtcaatctcttgacctcgtgatccaaccgcctcagcctcccaagtgctgggattacaggcatgagccaccacaccctgctaagttttttgctttattttgtttgttttccaaatttgttacaatgaacctatattacttttgtaataaggggggaagttttaatttattttaaggtctccatagctccagatactagttctataaataaaattattttagcagtttgcaatcaggcagttaacaatttcctttaagtgaaataaccaaagggtggtcaattagagaaaacagaattaaaattaatacgaagaatcttatagttctagaaatttgaaaatttcccttaagttgggccaatatacttgttttcacttggagggctattcttgacgtttgttttccaactaatcattcgcacatactaacaataccatacaaataaaaaggagttatgttgcaatactaatattcaaatatgcaaaaactctgtattttaaactaattagaaaccaggttttaaaatatatatatcaacataaatttgtcatacatatggaaaagatgattaagttacggagaaagttgcaaacagactggcacatgcattcttctttatataactcttttgagaaagaggagcaataaaaatcttgtatatcatggacataagctccagttagtatatactaagattgtttttgtcctcatactgagccaaataaatcataaaatgatagtgcttacaaaggtcatttactttgtatgtgttatctccaccatgtggcctgatgtttccatgtcactgggattatctaccttaacaacttaggccctaagaatagaagcattttacatttattgagaagcatgtctattaaagttcatgatgtctgtattatactacttttcagagtcaattatttttaaatttcagatcccatgacaagtgaaagctgcctatgagttggagagtaaatggaacaccatgcctagtacgattggctagttttaatttacctttaaacaccattttcaaattgtaacctgtattatttaaatttaaaaattaaaacctgcacatgcatgtaaaatatttttttcttttatacccacaagatttattacataatacacaataaatacacaagtatttgtgtatttgaattcaacttttattgccactttaatcaatcctaataaagtatcaaaaacaatttaccatatcactaaatattttctaatctggctgtctgcctggatcctaaaggtccaataaaaaaattaatttgcaaaaagttgttatgataaatacacaagtatttattgtgcattatgtaatatacaatacacataaattgttgaatttatgcaggctgatttacccaacaaaaccactaatcaccactagtaactaaatacagaactcaattttctctacctatacttttagtcaaatacattttaaatatttacatgatcttattctttaaaagatgagataatttaaaaaaaagatgagataattaactctaaggtgaaaaaagaaaattttaaaatggaaaatactggtaatatcaagtgttggagtggatgtggaccaatagggaagatttatgcaatggtggtgggaatataaattactgcaatgactttgaaaaacaatctggcattattttgcaaaactgaatatttacatattctaacacccaataattacaactatgtgtctataccttagagtggtggttctcaaatgtgtgatcctgtcacctgcagcatctgaaccacatttcacctgcaaattaaaaatgtacattcctaccccaccccagacctactgaatattaatctttggggatgaagtccagcagttttctcaagtcctcctcctcctccaagtgactctgatgcatgctaaagtttgattaactacctccctagaaaaatgcttgctgctgtgtgccaggatacatatacagaaatattcatgacagcactgtcaatttaacaacaaaatataaagaaaataaacaacctaatgtccactgacaggaatatcatggtagtatttgtataacatgtactttaataaagcagtaaaaatgaataaattatcactatgtcagatattatggttggaagagaattatattgaacgaaaaaagcaaggactggcctggcatgatggctcatgcctgtagtcgcagcaccttgggagactgaggaaggaggactgcttgaggccaggagtttgagaccagtctgggcaatataggaagacattgtctccacaaaaaactatatacagtataatatcaatttgagataccgtatgtcccgaagctgattttttaaaaatgtaacttagtggctaggcagagtggctcacgcctgtaatcccagtactttgggcggctgaggcgggcagatcaggaggtcagccgagaccagcctgaccaacatggtgaaaccccatctctactaaaaatacaaaaattagctgggagtggtggcacgtgcctgtaattccagctactcaggaggctgaggcaggagaatcgcttgaacccaggaggcagaggttgcagtgagccaagatcgcgccactgcactctagcctgggtgacagtgcgagactctgtctcaaaaaaaaaaaggtgagggccgggcacggtggctcaagcctgtaattccagcactttgggaggctgaggctggcggatcacgaagtcaggagtttgagaccagcctggccaatatggtgaaaccctgtctctactaaaaacacaaaaatagccaggtatggtggcgggcgcctgtaatcccacctacttgggaggctgaggcaggagaattgcttgaacccgggaggcggaggttgtattgagccagagatcatgccactgcactccaacctgggcgacagagtgagactccgactcaaaaaaaaaaaaaaaaggtaatttagttatgcatatatatgtgacaaaactatttaaaaacacacggcaaagagaaaaacaaaacaggagtacaggaacgtggataaacacattatgttattgataacatgctacttcttgggttatctggcagatttacagatgtttgctatattatgttcctctttttatgtatattctttattgtattcttttctatgtatcaaatatattaagaaatgttcaagcttaaaaagtgggccctcactaggttcttattaatgtttagccttcagaggcagaggttcagataaattttcacctttctccaactctaacaacgtaatggattcaaacctggatacttactactaacaacatatttctttttcattctttgttgttgttgttgttttagagatgggatctcactatgttgcccaggctggtcttgaactcctgaactcaagcaatcctcccatctcagcctctcaaagtgctgggattacaggcatgagccattgtgcctgcccccaacatgtttctgacctaataccaaaacctgaagaaaagttatttcttggaccaagaatgaaaacacggtacagaatgaaagtatttcctaccctgtttgccatgtttggcatgatgccacatactcagaaggcatttactaagtgttcactgaatgaatgaatgaatgaatgatgaattaatcagtatacaaaaggcctaggacttgcacagctcattattgaatattctgaagtaaaaaaagcactctgtgttcaagacgtatagaaactctgcactgacattaagttgctcagaagccacacactgcatgcagatgtgcaagtccccatttcaatttccttaatgccaactcttacagggaatattaaaaagaataacgaaaatgttgaggcacatggaaaaaggatgacaggtacaaacaacataactgactctttcggagcagttttaaaaaacaaaaacaaaaaaaaccctcaaaatttaaaccaaagattccagtgattagaactaaggccttcaaatgtttctgaccacacaccccattggtaacatacttttgggcatgtactcaaacatctgtatatttatgtatttatgaactacattccactgttagaaagtacatgttttcccaaatgatgaggactttcagtgactcagactatgaattagccactaagaatctcctaaatatttatcattaaatttagtgaaattctgccaaatacaggattgactttaaacattaaaataagccgggcatggtggctcacgcctgtaatcctagcactttgggaagccaaggcaggtggatcacatgaggtcaagagttcaggatcagcctggccaacatggtgaaaaccgtctctactaaaaatacaaaaattagcagggcatggtggcaagcccctgtaatcccagctaagcaagaggctgagttaggagaatcgcttgaacctggggggcagaggttgcagtgagctgagatcacgccacttcactccagcctgggtggaagagcaaaactccgtctcaaaaaataataataataaataataaataaataaataaaagtaaaaaacaaacaaaaaccaaaaaatcagaaaagaaaaaaatctgaagccatttgtcttcatgcactagaacttatttctaaatatcttgctaactaggatgactcatcctatcaatggctaatatttcaaagaataacatacacttagggagaggctgattattaatagcaattaataaataggacttcaaatattcttctttaaaactcagcactgtttcaacttctcaggtccaaagagacccactctttttttagtctcatggtttatacatactaggagaagtggcagcttctgccatttcctcattgtttacttgtgcttgcataattaatattgtctcaagctgcagtttctttgaagtaatcctttaagatcacttggcattttggtgagggttaatttggttaaaactagatataaatcttaatgtgccggttgtaagcttccatatcacaatgtcaatgacaaccaatctgtgaagaagacactattaaccttttcacatgtgaaggccgtcccttcttacaggagacctgagaccagctgaatgttcagtgactggaggcacctgtgtctttctagatcggaaaaatcaagttttcacattattttatatttttaagtgtaagatataaacaaaaggtatatttcttcctgacctccaataaatcgtcttggacactgtctgtggtgtgtcatctcactccagaaaccacagtttagagaatgcatagccctctctccaacgtcaaatacgtccaccactagttacattcattcaatacacagacaattcctggcgagcatataacacagcaccttggaagaattctgtgcctctccacgcccttccccaggcttcatagtctcacagtctggtaactactaaacaagctatgagagggaaacttacttgaaaaaacagagattattcttataaccaggaaacaaaagcagaagcgaggtaagggagataaagtaagtggtacagatattccaactggtggatgggaaatcaaattctattctatttgagtagcacttttcccagcttattcttaatgaacattcatgtcatgatcatgccaatccaattagtcactttatatataaaaatgcaagctgttatgtattatgcagctcttttgtcaaataagaataattataaatttttttaatcaactgaagggagagaaaacactgccaacgtcttagaatatgttcatcagctgagcagtgaagatcatggctttgcttctttttatctagtactctccagtttggatttttacgttgtaacataaacatatttatatttaattatttgagatgcattttccccaatcttctgagattctctagcagaatatttttaaagtaaataaaatttaaatccaagaatctaatctagtcaaaactagatagcttaaaaaaaaaatccgtgtgaacaacaatatggaaagaccaactcagttaatttttgacaaccaaattgagtggatttgggagagatttagagcaaaaatatttatgactaggtttaaatatttgtcttccatgagtaacatagcagagatactgcattaaaaaggtcaaccagaagtttgtttttgagaaatattaccaattttgaacatactaaatctttcttagagtaacaacatacgttttagataacaggtagtagctaagtacagaacaggtttagaaaaagttaatagtgatgagaaatgtaaacttcgtgaacatattttcggggtagcattcatgataactcaagaactcgaatttatacgaattctgattttaaatgagtattaaatctctaagaccaaaagaacataaaattatagccaacaaaccacactctggttcgaattttcggagcatgtttactctacactgaataatcggaaagccatttttaatgccactggacaatttcactatttaaaaatttacagtgttccccgaatgtgcaggcagcagagtattttggcaaccaacacagcgagacccatttacctttaccttagactcgtaaaggctgagttacttctaggtatcatttagcaacgcaataaatgtctgcctcgaacagtgaaaatttcccaaaggagcagaacaactttcatgggtggggcaaaaggctgggaaggaagagaattcgttttggcttgctccagcgctggaagaacactgagcaccacactctccgcaaaggcctaacacagcaaaggcgactgtcaaatcgatcccttttgggtctgctgtacccgtcctctagggaatcaaaataaggcaaaataataaaaagagtacagagaagtttggcggcggcggggcgtgggggcttgaggcatctcagagaggagggcaaaaatcaacaagaaaatgcccccattttaaaaatcctgtctgcgacctcggatgggagattttgtttatccacgggcagtttacttctgtctccctgacccatctccacaggctctggtgctcgccgccactttccgagcagatcattactcagcaccggagccggcgcgcctcctcccgcaggcgggagcggggtctcggggagaggcgggaagaggcgcgaccgcccgggcgcccaggtgaccgcggccctccccgcgcccccgtccccgcgccccccgcaccaagcatccgggagacccggagcccccgggccgaaccgcgccggcccccaggcagctgaggcactgaagggcaggctcgggcacgggggtcctgagggtcgggaggaggccgcggggaccctgtgctgtccccgagcgcccccagcccgcgcacgcccacctcccagcccctctacccaacttcaccgctgccccgccagccggttccgcaccgtccgccctcgccccgacccccggcccgccgcgccccctcacgcccccgttacctttccgttcttggggctgccgttcaggaacagggtcacccgcctcatcgcgctgcccccgctgggtcctgagtgagccgccaccctcccacctggtcctcctcccacctttttctcctcccgcccttcccctccctccacccactcggattcgcctcccttcgccaccttcctgcccttggggacacaccacacgcacgcactctgtcccacacccaaggttcggccggtcctccttcccaccccgcccctaggctcctcagcctgcctggggcccttcccccacctctccgagactgacactctgccgtaccaaccaacccgcgtcaccggacagagtccagccaatcagcacccagtatcgggcgggctctggctaacctagccgggacggagggagggaagagacgctgaaggctagtagacgggaaggggcatcagccaatcagagaggctcctggagccggacggcggcttccagcgttactgagcaggcgcaccctctagtttaggtagcgcttatctgcatacgagggcggggtctggggaaaggaggtggagcgctgaaagggacccaagcaccagtcagcccctcctccagcgttagccccgcccacaagccggcccagctaggaaacggctgcggtagggacggactgattgggtaagagccagctcgtcgctctgttaggattggttgaatgagtcttttcgaagtttgcagcatccaatagaaaggtgggaggcggagttaaagcgctaagagaagcgttactccgcgagactctcctgaaaagtagtccccgaggtcacaaggcagtggcaggtgtctgtagtcctcgggttgactgcagctcgcggtggtccctctccgagcccaggaagccactccagtgccgagggagaggcctgggagcgctcggagtgtgcgcggactggagaagggggaggtggcggagtgattcgtagagtaaattcggtaccgaggggcggggtcggggatttgaatcggtcggcgggcggaggaggcgggtggaggaggctgccgggcagagcgcaggccaggatcagcgcaggctgtgagtccaggtcagccgtcgggacctcgggctccgggttcgaagagcggctcccggctgcgggtgctttgccaggagagcccttccggacagaggagccggggtctggaaggagcggccgacgcgacgctcgcctgccacggggctctgggagtaagcctgtctgcctggcgggccttcaggtgcggcgtgagaggtaggattgcatccgcgctgccacggggctgtttctccggggcatttctaggcactttgttcggcttaccctgcagcacagaattagtactcctgtcaggagctgctctgggtgaccaggagtgcatccggacctgttgagagaatttctggaaatggatagagctgcgtcttgagaggggtacccttatgattcaggttttcgctacggttgaaaagccatggcttatcctttggggtctgctttggtgcctgaacagcagttttctccatttctttctgtttaatttggctttaaaagtacgcgcttagagtaaaagaatggttagcacagggtgggaagtgtattggggatggatgggaaggaagtggagatggttaataggtagaaaaacaaagaatgaataagatctagtatttgctagcacaacagggtggcggtccataatttaattgtgcatttaaacataacgaagtataattggattgtttataacaaaaaggataaatatttgagataatggctacctcatttactttgatttgattattacgaattgcatgcctgtatcaaaatatttcatgtaccccataaattatacatctactgtatacccacagaaattaaaataaaaaatgaaacctgtgacgtgtgtttctatgccagtatggactgtattacaattcagtcctgaataaggtacgtgatcgaatcacgttcatcttgctggtggggttatttttcattgtttttcttcacctcttagatggatgccaattcaaaagacaagccccctgaaaccaaggagtctgcaatgaataatgctggtatgtgatgatctgcctccttgtgaagttgaaggtttagacagagagttgtcctcacccctacaatatgtcgtccgtttcaggaaatgcctctttcattttgggaactgggaagattgtgactcctcagaagcatgccgaattacctcctaatccttgcacaccagatacttttaaatcacctttgaacttttccacagtaaccgtagagcaattgggaattacacctgaaagctttgttaggaactctgcaggtaagaaaagttgtcattctgttgtaatgcttttcaagtttaaaaataactttaatataactcagctttatttgtttatacgtactgtcatattttaggtacctaaattgcctactctgcaaacttgcttcttcagagagacttctttgcacatgcacagttcatttagcatagcagggatcacggaatcgcagggcacccagcatgataatgttcccaagtcagagtcgtgcttgatgccaatactagaaaataatgtgtgtgtgagtcactttttgacctgtcacctaggatacaggagggtgtatgatatgaatagtaataatgcattttgttttcatttatggcaaaaataagagaaagtttaagagcaattaagaaaatataatactgaaagagcaggatgtacctcctttaacaatcacaaacagggttgggctcagtggctcaagcccgtaatcccagcgctttgggaggccgaggcaggcagatcaccggaggtcaggagttcgagaccagcctgaccaacatagagaaacctcgtctctactaaaaatacaaaattagccgggcatggtggtgcatgcctgtaatcccagctactcaggagtttgaggcaggagaatcgcttgaacctgggaggcagaggttaccgtgagtcgaaatcgcaccattgcattccagcctgggcaacaagagtgaaactctgtctccaaaaaaaaaaaaaaaaaaaaaaacacaaacagaagattgattctggctaatgtccttcgagcagtagaaatgaagtttacttgtgaagtctgacttagatggaaaagaaggaaatactatatgagaatggaattggatcagagaatagcatttagaattggaggataatggaagtcttgaatatcacagggcactagaccaggtaatacataagacaaggcgaaagtggcacgccaccctaactttcattctcaaaaacatcactcttagacctttaaaaggctggattcattttgtgtgcttaggcatatgtccaaaattcagggtagtgctgatggtaggtatcagaaagaaacaatcatcttgaagaattaagaacctgagactgcatgtacctaggtggagatcttacctttcagttgctggggataaaactgacttatttagaaaaagaaaaatactgagtcaaaagcaaaagccatctgtgtgtaggaaataagaaacaaaaatgaaaacttaaaatgtgttcatgtatttattcaacaacttttaataactgttctatgtaccaggcactgttctaggagcatagactaagtcagcagacaaaaagattcctcttccactgattgtatatgaatgactgtgccagtaactctccactgagttttttgtagcacatgtttatcatgttttctctctcaggctggtacatcacgagtattggatgtggttactgatgattgccttgttttgttccaatttataagagagtttcattacaggaaagtcatcatcctaccttaaaaaatgtagacgacgttctgcagtcggtgctcggggctctcctgaaacaaaccatctgattcgtttcattgctcggcagcaaaatataaagaatgctaggaaatctcctttggcacaagattctccttcccaggtatgattttcttctaagttctgtcgtgaattccgttaatgaagcttttgtgctttctttacaccttctagtgcatctgctctgtttcaaatctggagggagattttctctgtgttttagagaacatgcagttagcggccgggcgcggtggctcacgcctataatcccagtactctgggaggctgaggcaggcagatcatttgaggtcaggagttcgagaccagcctggccaacatggtgaaaccccatctctactaaaaatacgaaaattagctgggtgtggtggcaggttcccgaaattccagctacttggaggctgaggcacgagaattgcttgaacctgggaggcagaggttgcattgagtcaagatcatgccactatgttccagtctgggcgacagagtgagactgtctcaaaaaaaaaaaaaatgcagttagcctaaatgatgatgttgaccatgggtgatttttctttgtttgctttgttttagagacaggatctcagttgcccaggctggaatgcactggtgcaatcatagcccaccgcagcaatgaactcctgggctcaaggaatcctcccaccttagctttccaagtagctggaactataggcatgtgccacagcaatgggctaattataaaaatttttttttgtagagatggggcctcactatgttgcccaggcttattttgaactcctgaccctaagcaatccctatcaaagtgctggggttacaggtgtgtgccacagtgctcaacccaaacgagggtatttttagagttatgagaccctggatagaaatagctttctagaggagctttttattttatttctcaatttttttttctagttaagatctacttttctatgaggtgaggcactactacctttttaagagcttatctctaagttactgattttttcatgactactgtgtgttgatgtataggggcaagggtctcctggacaaaatgtatttgggacaaccttgtggagaggagtagattatttatctgctgatggggatatatttagctgttttttcaaatttttatacatccccctaaaaagtcagatacagtcttgtgctacataatgacattttgttcagtgatggactaaatatacaatggtggtctcataataatggagccgaaaaatttctaaggcctggtgatgtagctcatataacatcataaaacaatgcattgctcatgcatttgtggtgaggctggtgcaaacagttctacggtgctgccacttgtattaaaatctagcacaaaaggttacctacaatacataatacttgatagtcataatgaatgactgttcctggtttatacatttactatagactttgtatcatgaatttaaagtgtactccttctactgattaaaaaaaaaaaggaccttaatgttgtacgtgtgttgtgctggcagcagcctcctacgttctccctaatccattggctatcccacagagcagtcaaggagaggcattcatttaaagtagaaatcgaatcattcacccggctgctcagaatcttcccatggcttcctgcgatcccttgaattaaacctacaccccttcctgatgccttcgtacgcccactctagtctctccccatctccttccactcacagggcacactggcttttctgccccatcctgtttccactcaaggccttggcccttgttcttggagagtacctccctcctgtgacatcttcccttagacctctttctcattgttttggcttcaactcagattttactaaagatagaggtctgtcctgattctagctaagccagcacttttagggactcagccacattcctgatatttcttctcaatagcacctcttttacctgtaactacgtttatatgttttcagaatttcactctaaacggtaatttccctggctgggtatggtggctcacactgtaatcccagaactttgagaagcaaaggagggaggatcgttcgaagccaggagtttgagaccagcctgggcaacatgacaaaactccatctctacagaaaaattttaaaaattatctgggtgtggtggcacatgcctgtagtccaagctatttgagaggctgaagttggaggatcgtttgagcccaagatatcgaggctgcagtgagctgtgattgtgccactgcactccagcctggctgatagagcaagaccttgtctcaaataaaaataaagtaattttccctagatcctgagcccctcaaacagtttgtggtgcatggaaggaaggttgttgactgaccgacacaattcctaaaacaaaaacatcaaaaaagcagtacattttgaatgtttcatttgctttgtatgtaaacattgttctccttctccagtagaaaatagagaaaaaacaattttgactagagaaacttaaaatttttttaagcagcatttcaaagtgctgcatgttcctaggatattaaatctgcccctaccatgttcaaatatgtgtgcaaaaaaagcacattcaaagtaaattgtatgaatttgagatcatcttttccctgtcgttctgttagatgaattgacataagccttttttgaatattattgctgtttatgtcgtgaacgtttgtgtcatcaaggatatttcaatgtaaaatgttctcattatgtaatagagaatttgctttatatttaactgggaagagaatcaaatgtgtgaacagatcaccatcaaacatggcttcacgatatgaactgctttttctccctgtgatatatatatattttttctgagaccaagccttgctctgttacgcagcctgaagtacagtggcatgatctcggcccattgcaacctctacctcccaggttcaagcgattctcccacctcagcctcccacatagctgggattacaggcatgcaccaccacgcctggttaatttttgtgtttttcgtagagacatggtttcaccatgttagccaggctggtctcaaactcctgacctcaagtgatcctcccaccttggcctcccaaaatgctgggattacatgcatgagccactgtgcccagcctactctgtatgatatcttaaacggaggtaatttttacttcactttttgcccattggtataatttttaaacattgccacaaacttcatatcagtggaaatgttagtagtccaagtaataaaaaaaaatctagatagagaacttcatttgtaatttaatttttatgtaaagggaactctcaatttttatattacttgtctttaactggcacttctatccctgctaatataaatttcattttatcagtctttggttggaaccctgttaacggggtttccagagagcttctgtgcttataccatcaaactttgtattttaagagaatggctggctttcaaccctaagaaggaaatatcctccaggtcccatacaatcaggaaaattagctgggaagagccaaaaaggagagcagtgcaagtgtagtatctgagcatgtatggaacttctgtgtctcgttctggcccctgggctggagggcatgtgtagacccgtgctgagtagaaacagcttggactgaaggaggtatgctgagacttacctgtgacacaagcaccatgcagatggcttcctatggatacatccagcacaacatttggtaaaaattgcaaatagacaggttcctcctgtcccttttttgttgcaccatcccagagcgcaatgtttttttggcaccttccatataatcttaggctggcctctcaacatttttgtgttaaacttccttattcaaactgaaaatgggtaattccagggtgaagaagctctgccacactaactccttaccgctgatcttcaaaaagcatatgtgtactgtatttaattttggattcaatggctgtaggcctagaatatagaaagtatgaattgattataatactccttgtatattttgcactttcacagggcagccctgcactgtatcgaaatgttaacactttaagagaacgaatatcagccttccagtcagcttttcactccataaaggaaaatgagaaaatgaccggctgtctggaattctcagaggcaggaaaagagtccgagatgacagacttgagtgagtagaaataattcgttcagttttgacttcaatatttataaagacaagcttctgagttatgaaatgatttagtgtgaagccaatcttttcagaacacaggtatatttataaagtgagactaacattaaaaatttgggacatttcacacaaaaataaggatttctggtttctcttagaaaaaaaaacctgttatcaggcattcctaatcctacatttccgcatggttgcaattaaattttaagttttaaaatgccagagataattagctcatttcacctttaccatagagcttgtggcaaatttgagtttacaaatcttgatttttacaggattattattaagctcggcaagcatttagtaaatgaaataaattcatataaattttatatgagtaccaaacacccaaccctgatgttaaaaacaaatatattcagccaggcgcggtggctcatgcctgtaattccagcactttgggaggctgagacgggaggatcacttgaggtcaggagttcaagaccagcctggccaacatggtgaaaccctgtctctactaaaaatacaaaattagccaggcgtggtgacacatgcctgtaactccagctactggggaggctgaggcaggagaatcacttgaacctgggaggtggaggttgcagtgatcccagatcgtgctattgcactccagcctgggcgaagaagtgagagtccctttcaaaaaaaaaaaaaaaaaaaaaaaaacacacacacacacacaaatatatccaatctgataatctgctatattctttaactcttagattgtaattcatttggttgttttttcagtcttttttttttcccccccaatcacgaagcatttcagataccagaatgtgacaaaatcttggtcttactgtaatcattataaccattctctggtactttacacactaaggtttcaaatgattctgttttgaattcttgaaccatctttaagtgcatttcagcacctcccatgaggattgctctgttagcccaagacaagtccccctcatctacctctagagtgcgtgacccattcagatgtaccgatttatatttgtagtttgtgactcacttattgtttcagttttttcctgggttttaaaatttatttacatcattataattctgcagacagttccttttttttagctagaaaaaaacaggtacgttgtggttgtctttttcataaagtcatacagagtattagagcataaccacatctttcaaaataacaggtgtcatcatttaaaaagcgtgaggtaccatattagacatgcaaaagtattttagtatatctttgtaccttttaaggcctgaaaaaacttaattctaataatatgaatgtattatcttttcaatagacatgttttcattcctttcagttagatttaattttttttggaataaaaaagtgtggtagatttttcttttcattgataatttagacttaagcactagattttactaaaattacgatgcacaatagccgggcgtggtggctcatgcctgtaatcccagcactttgggaggctgaggtgggtggatcacctgaggtcaggagttcagaccagcctgaccaacgtggtgaaaccccatctctactaaatatacgaagattagccaggcatggtggcatgagcctgtaatctcagctatttgagaggctgaggcaggagtatcacttgagcccagaaggtggaggttgcagtgagctgaaatcgcaccattgtactcaagcctgggcgacaagagtgaaactccgtctcaaaaaaaaaaaaaaaaaaaaagaaaagaaaaaaaatatatataatatatatgaaaacatttatgcctgtgtcgttttgtttttattttgtgtttatagccagaaaggaaggtctcagcgcttgccagcagtctgggttccctgcagtgttgtcctccaaacgtcggagaatatcctatcagagagactctgatgaaaatctgacggatgctgaaggaaaagtaattggtctccagatattcaatattgatacagacagagcatgtgcagttgaaacttctgtagatctttctgaggtaattcacttactttacgcataggaaaatgaagttgttggttttctgcataggcagttttaaggctgtcagtgccgttcttcaattttagtaccttgttctgccctgtggttcctggggtgtgtgtgtgtgtgtgtgtgtgtgcgtgtgtgtgtgtgtgtttcctacctgttaattttatggttgctggtatttatcacttattagaaacagtttggataatgatctcacttttgactactaaccttacaaagagagtaagccctggggtcttctacgtatgaggtattctagagggtgatgctccaagaagggaggaagttacagtcttgcccttaggcagtattttttctactggggagcagggtataagcagatggcttcagtggagctggtggatcaggtggagattctgtgtggggtgtactccacaggcttgggagtcttgcacttatacctgcccctgactgctttccttctgatggaaatcagggtgccattcagcaatttctcctttgctcacttctttcaagtagctctagggatttttgtggcttataactacctaaaccctgtcaagacgatcaaaaggcgatattagaaaaataatactactgaagatcagttgacctgcgcgcacgcgtgaatggagagctggtctctcgtgacggacttttcttacttcatgcttctagttctggtttgacacagtagctcctcatggcctttgtgagaggagacacctaacaccgttacagttggaaccctttctgcactttctctgtcacttagatccagtgctcgtcctattcgttttatgtggactggcagaacaaagatttgatagttattagacattcttcaggctccagtgggtttcctttgtatttcagtcgcctgtaatctcggctgcctccgcccttttcaggttgatgtgaaatccccactggacagaagcaagaataattgtttgttatcagaactttgattaattgtttgaacatacatcatgattcagatattatttctgaattagtgtgaatgtgttttctatcctagcctttaatgtttttcatatcctagttattgatatcgtttggcgtttgattaataattatataaactttattttgagaattttctctaaagaattacagatgatacagctatctaggctataacaacaaaaatatatcctttaaacttttcctggggaattaaaagttgatttgtgggatgtttaggatgcagttaatatgaatagttcatgttagattcctgtacactttgagatacactttatgagataaagtgtacacttttctcaggataaagtatctcctgtacactttatgagataatgaaggtgactgattgaacatcagatttccaggcaatccataatgtttactcaaatcttcaaaaaggcattagtagtactctaattaataaaatgtaatactctttcaatttttccccaagatatcatctaaacttggttcaacacagtctggatttttagttgaagagtctcttcccctttcagagctcacagagacttcaaatggtaagtaatcttttcttagtacatggccagttgcccgattcatagacatttatgattagtgtacctatttgctaaaatttgggggaactgaaattgtttcctactttttaggagctcatggcctagtagaaatgcttctgaattcttgttatatgagagatactctcttttttaagctacgatcaataagaattagtgaagtattttcaagctcatggaatttagtataaagaggtagcacctatgaacatattaacaagtattctttgttataggaacactacttgtaatatttttatttgtttttaagcatgtaaaaagagtcttaccaggatgtaaaaattattctttctcaaaatcagtatgcttgtactgggtgaacattactagcaagggtttagattgactttttttctacttgggtctttaaaactcttatgggcatataattggatcttgtgttttattaatccattctgataatttattgtaattggaatatttcgcctattaactttttaggtaattacttaacatggttttattcacatctgtcattttatcatatgttttctattcctgattattgctctgtaatctttcatagtctggttagttgatattatacaatttcacataaaatacagaaactacaaactctacagatcaatttcctctcctttccagccatggcttttatgatcctttacagatacacacttacttcattataagcctcacaagatgttgtttttggattaaacagctgtatgtgctttgtttttctttttttttttttaaggcagtttcttactctcttgcccaggctggagtgcagtggtgtgatctcagctcactgcaacctccctctcccaggttcaagccattcttgtgtttcagcctcctgagtagctgggattacaggcgtgcaccaccatgcccagctaatttttatgtttttagtagagatgggattttgccacattggccaggctgggcttcaactccttgcctttagcaatccacccatcttggcctcctaaagtcctgggattacaggcatgagccactgtgcccagccaaaacagttatatgtgctttaaataggttaagaggggaaaaatagtcttttatatttacccagatgtaccatttcttatgttgttttttcctaaagatctgagtttctctgtcttattttccttcaacctgaaaaagaacttctttagcatttttgtagtgagcatttgctctgacttttaattttaatcataagataaatgggtggatgtccgcctgcatggtccccctgcacagggcaaggttgtgagtttgttaccacaatggaataaggtgttcttgccttcaatgttttctttcttcttcttcttcttatttttgagacagagtctcgctctgttgaccaggctggagtgcagtggcacaatctcagcttactgcaacctctgcctcctggattcaagcaattatctgcctcggcctcccaagtagctagaattacaggtgcctgccaccaagcccagctgagttttttgtattttcagttgaaacagggtttcaccatcttggccaggctggtcttgaactcctgacctcatgatccacccatctcagcctcccaaagtgctgggatttgccaccgtgcccggcccaacagtttcttaacaattctttttgctttgctcttatgggactttgcgtaggagtgacagattctctgtgacagtgattatagattgtatgaagtgtagcgattcacagttgtcatcatactaaacacctcactctacaatgtgaaatgttgaaatcacacaggccaaaattttatttaggcatgccatgaggccgtactcagaaacagtgtaattaaacagggaagaatagatctaccatagtagatggggccttgatgaaaggagtctggtgttgatttctgtattttaaactgcgttgttttttggtggcaccccagacagtgcaccttcaggaagaataaaaagatgttccgagatggaatcaaatgtctctttgttaagggggagcttagggggacctgcatgacacctctgatctcctttaccccctctgcttcctctgttttacctatgtagccggaaatccaacatccaactcagcgaatctccctgccttctctgcacctgccccagagctgctaatatttggtatgctgatagcctcaattttttttttttacctcaaatggttctgtgctgtttcttttttattttttatttattttttttttttgagacggagtcttgctgtgtcacccaggctggagtgccatggcgcgatctcaactcactgcaacctctgcttcccaggttcaagccattctcccacctcagcctcccgagtagctgggattacaggtacccgccaccatgcctggctgatttttgtatttttgtagagacggagtttcaccatgttggccaggctgatcttgaactcctgacctcaggtgacccacctgccttggcctcccaaagtgctgggattacaggcatgagccaccacacctggactgtgctgtttcttaatccacacactttcacaccttatttttctcttaaaatatccaacgctccttcctttatttctttttaaaatttagatacatataatttatgttttcaacagataattttatagtgtgtcatgtaattgttttgtttttcttaaatttattactattatttttgaatgacaaaccataactgtatatatttatggggaacaatatgatattttgatatatttatacaatgtggcattattaaatcaggctaattaacatgtccctcacttcacttacctgtcatttttttttatggtgagacgtttgaaaattactctcttagttattttgaaatatgtaatacactaatattgactatagacactgttgtgcaatagatctcaaaactgattccacttatctatctgaaaccttgtattctttgatcaacaattccccatttccttcctcaccacttctacagcctctggtaaccactattcaactctttacttcaataaattcaactttgttagattcctcatgtaggtgaaatcatgtggtttttgtcttttgtgcctggcttatttcacttagcaaaatctcttccagattcatccatgttgttgcaaatgagagtctcctcgcttttagggttaaatagtattctgctgtgtgtatatataccacgttttctttatccattcacccattaatggatgctttttcattgatgagaatgatgttagcgacaggtttgtcatgtatgtcctttattgcgttgaagaacattctgttcctagtctgagaatttttactgtgatattgtgttaattttatcaaatgctttttctccatctattgaggtgatcatatggtttttatttttcatcttttttcatttttcaagagcgtttattaaaataggcagtaatcagtacatgtgcatcatatgagcatttattcaaaatcagcccttccaggagaggggctgcatctcagtttttctatctatataattaaaatgaccaaagtacttccctaaagtagaaaggcatttcattagtagtcttgggaccataacagaatatgattactaaacatctccaacgtggttttcattacagagaaacatgtttcacataagagcttcataatataatccagagacagaatttgtgcatggttaaaatttgaagccagactatttctgatacatatttttttcatttcttccggtttttatttttgtaaatatgcatccagtttcctaccagtttaaaacacacacacaaaacactgctcagagcaccatgaatgccttacagtagcttctttgagactataatcctaattcaaggagggcagtactaatttctattctgacttgctcctttccccaaatctcagcaattgtcagatacaaaaaaaggtttctgggcagagggccaaagaataattatgaataatttcacaatgatctggttaagaaaacacacagaaaatggtgatgatatggtttctatttttcatcttctttatgtcatgtatcacatagatttgcatatgttgaaccatccttgaatcccagggataaatctaatttgatcatggtgaatgattcttttaatgtgttcctgaattaggtttgctaatattttgtggaggatttttgcatctttgttcaccagggatattggtgtataattttcttatatgtagcagggtagtgctaaccttgtaaaatgacaaggaagtatttggaagtattttctctacttttatttgttttgaaagtgtttgagaaaacttgtcagttctttaaatgtttgatggaagtcagcaataaagccatctggtcctgggcttttcttttggtgggacatttttattactaattcagtcgtcttctcactcattattggtcttttgagattttctattggttcatgatccatttcttttatccaatttcttggcatttaattattcatagtagttgcttgtgatcctttgtattttggtgtcaggttctctggttgcttcctgtgctctgaagtcaaatgatattgctagctgtcctccatggtctagtaagatcactggctggactctgccttcagtcaggtagagctgctctctgggttctgtgattgtctctgatttggcagagttgcaggttgtcttccttggctggtcagtactattgtttggaatctgtagttgggcagaaccatgtgatgggctctgagtctgcttgaggttgttgcttggccccatagggtgggcagggcctgaggctgtactccacagatgtgtgtggattcgggcttgcctcccagcccagggtagggttaagcagagcactgagatttggtagagtcacttctctgcagctggggtcgagcagggacagatgctccttccacaggtaatcactgacacagcctggcttagggaagacttagtgacagcacaagggcttagtttgatcacctttccactgctaggattgggtaggcccagatgtacctttcatgggtaattgctgacctacagttgctccccctaagccaaaatccaaactctgaaaatttttgagtgccaacatgatgctcaaaggagatggttattggagcatttctggattttcaggttagagacgcttgactagtaagtagaatgcaaatatttgggctgggtgtagtggctcacgcctgtaatcccagcacttcaggaggccgaggcaggcagatcacaaggtcaggagttctagaccagcctgaccaatatggtgaaatcccggctctactaaaaatacaaaaattagccaggcgtggtggcacctgcctgtaatcccagctactcaggaggctgaggcaggagaattgcttgaacccaggaggcggaggttgcagtgagccgagattgcaccactgcactggagcctgggcgacagcgagactccatctcaaacaaaggaatgcgaatatttaatgcaaccaccagaacttagttggctcacatctttacagctagggttagatggggccagatatttcctctgtgggcaatcactgacctacagttgcttctcgacctggcgaagacctgatgggagcacccaggctgtgtggggaagctggacagggattttaacctggaagacccactaaccatgtttcctgcagtttaatactgctggctggtttctctggtgtggcatctctgttagctggaatgcaggaagccaccagaattcgctctctggtggctgtgatccccatcccacgttctttgtttttatctgccccccagtggcccagccttgccagtactcccagtgtttcctgggggacaagacaggagtgcagctcctgcgaagtatcccagaatggtggggaagccaaacgtctgcttcccactcactcttcccactgtagaaactgtgggtccaggggaattctctgtgtgtggcactgtgccagttgggagaagggcagcacagtcaaacagaaaagtttcttaccacttgtttgtggcttttctccattctggggtccaaggaggtgtgtcaacctcactcccaaattctgggatattcagaatgttatttttgcctgcagatagttgctcattggatttctctgggaacagggaatgaagccacagaactcttactccactatctcccccacatcactccagtgtttttgttttatatcaaagtacacatacgtaaggaattagatataattcagatttaactgggcccctgcatctttatttgccaaacctggcagctctactcatgagtgatctgagagaaagttccctggtagccttttgcagttccttgcttcctgtaccattgagaaaataagagattttgggagcaaaggtcttggtcctctcacccctaagccctcctgcatctctgtatgtgtgtatctacctttgctcctctttcaaaagggtctcaatgttcttacctagggccagcctcttttttttcttttttttttttgagatggagtctcactctgccgcccaggctgtagtgcaatggtgcggccccagctcactgcaacctctgcctcctgggttcaggtgattctcctaacccagccctcctgagtagctgggactacaggtgcccgccaccacacccagctaatttttgtatttttagtagagatgctgtctcaccatgttggccgggctgctctcaaactcctaacctctggtgatctgcccacctaggcctcccaaagtgctggaattacaggcatgagccaccacgcctggcctctaccctcttttttagggactgattcccattgctccttctccttctaaggaccttgtgtctgagttgtctcctctcttttctgaattgttaacttttcttattcagctacaagatgctgtaaaatatcccatcttaaacttccctttgccccaggattgccttctagccagaacaccatttctttactctactttaggcaaaacttttaagagaaggccacactctgtctccttgcctcccattctttcttgatccagctccaaataggccttgttgaccagccatctcctggctgccaacccagtggtagtcagactcaacacattcctttccttgatgtcttagcagcactatggacggatatagacatctacaaccaggccctcctgtgagaagccttttcctcacctgggtttcaggatgtcattctcattttcccttgcatcactgaccatttcctctttgtgtattttctttgctcctcttctttcatcctgaccttcaaatatttgaatgccccccctcgaccttcatgttcggtgcttggaccttttgtctctatatacaggttgagcatctgtaagccaaaaatccaaattctgtaactttttgagtgcaaacatgacactcaaaggagatggttattggagcatttctggattttcaggttagagatgcttgactggtaagtagaatgcaaatatttcaaaatctgaaaaaaatttgtaatctgaaacacttctgatcccaagcattttggataaaggatacccaatgtgaactctttctaggtgacttcaaacattatcacatgctgttgacttcaaattaaaatagttgcccgtggccttttcccggaactcttgaattaagtatccagctccctttcatgaccttcacttgaatgcctaataaacatctcaaactgaacatagtcaaataggtcttgatgattttttccttcaccaacctgctcatctctgttttcctcatcttagtaaatgacactctcattcacctcattgctgtatctcaaatattggacttaacttgatacctttctttttcttttccttttttttttttttcttaagttagagtctcgctgtcacccaggctggagtgcagtggtgtgatcttggctcactgcagcctcaacctcctgagctctaggagtcctcctacctcagccttccaagtagctgggaccacaggtgctcactaccatgcccagctaatttttttttttggtaggtacaggatcctactatgttgcccaggctggtctccaactcctgggctcaagcaatccttccattccaccttggtctctcaaagtgctgggattacagatgtgagccactgcacccaagtgatacctccctttttcaaatgaaacttgtaatcgcattgacaaatgctactaggtcttcaaaatatgtcaaatgtccacccacttctcaccttttgcattcctatcagtgtggtccaggccatcaccatctcctgcctggatttttttatgtatcctctgaagtggttttcctgcttcccctctttccccaatcccctgttacagtttttcacacagtagccagagcactggttttaaaatgtaagtcacagtatctcactgccctcctcaaaatctttcatcgacttcctgttatacttagagaagtagccaaagaccatattatttctactaggccttccctggcctggttcttaacctttgctctgagcttatttctcagctctcttgtccatgcccactgttccagccacagcagccttgctgggcctctgctatgccaggtacatctttacctcaggtctttgcacttggctttgtgtgcataatgtccatccctagatctatgtgtggttcgccttgttcttttcaggtgtctgctcaggaactctctgtttacccaaagcagtagcacttccttccagcttatcatactgtattcctctcttgctacattattttccttaatagcatatattaactacttgttgtgtgtgtgtatatatatatatatatatatatattaactttttacttgaaataactataaatttgctatctagttgtaagaaataatataaagaaatccagtattcccttcacctagtttcccgcagtagtgacatgttgcatagctacgatatattaatatcacaaccaggaaattgacattgctacaatccaccaacttgttttcagatttcaccagttttacatgcacatactttttgtgtatgtttagtccgtgtggttttatcacatgtggattcatgtgagcacagtacagccaagccacagcatggttctgtcctgaggatcctcatgttacccttcatagccatcactctttccctctccctcctccctgctgtgagattttataatccctgcttattccgtgctggttttgggggtttgctcatctttacttcttcagcacccagaggagtgcctgtcacatcatgtatttgttcaatggatcacttaatcataaggcaacgctctcctgtgggaagaatttgggaagaaaagccacgcctgtttggggcacatacagtgtgtttatagtttggtgtgatgatctttcttttctcattcctgccaccctcggatgttgaaatgcctgtgactctagcggtaaaattgcttattagtcaatgcttggctcagattagtttttatggtccaagtagtgggtgtcatgagtagaggcacgctaatagcttatagctgattcatgataccttctttcaacctctgactcagagatttcctggggagccaaatccccatacccactttacccttcgtagtccgatttgaggtaaaaactgaccgatgctgcttctttacctccttttctgtttccaaatgaaatcccagacgttactgcccaatcaggttatattaggtttgaatttcttcatagcatgttattatctttgcaaatactatatttttggtctagaacaaacagatttaagagatcttctgcctctcaagtttacatgtttatcttgaagcactaaaggttgctgactgtgtagtgggcaaaggatcaagtgatgccgtttcgcctgacacgttcacagcagaagtgagctcagacgcagtccctgatgtcaggtcaccagctactccagcctgcaggagggaccttcccacccccaagacctttgtacttcgttctgtactgaagaaaccctctgttaagatgtgtctagagagcttacaggtaagaagagagttaaatttcctaaagcaaatgaataaaaatgcattttgcttcaaagtaatacccttgaaatgtcatatatcatgctagtttaaaaggaaatgtcttactcgtcttaccgtaaatttttttcctcatcttttcttattaacaacactgggtgtagtttctttttgttcttatttttaaaaaattaagtatcgtatatagcatgcagaatttaatgtaagtagactgtagtttataaagggtcataatcttacataatcttattgcactaacataattatatgttattgattcattttatataattatataagtgatattaattacttaatcataattaatgtgtcaatctgttaaactgatcattccacccaaaatatttagtcttaaaagtacctcttatagccatccttttttctcgaagctcagtcaatatgaggaaagagaaagttgatgggaactagctggcatttattgagtagtttctgttgacagttctggcatatatatataacagtagtgctccgagaaaggtataggacctgtttgacatacacttaggcttgtaggttgttaagtgaacccagataagtctgctgttaaaatccatgacaggctgtcagtccatgagaggttgagagcctagcctcaggagtcaaaatgccaagtttcagatcttgacttggaaatgtaatcactgagcaaattatttgacctttctctgcctggtttccttatctataaaaatgtaaagttggtaactacttttagagtaatttgagcattaaatgggataatataaaatcaccacgagtgtctggcacttcagaaatacaaatctttttttcaaaccataagcattttaacatacaagtatgcctacaagcctgttctgatttgttctgaagccaaaaggaactaaattaccttctatttacatggatcattgatggtcaattgctatttgtaaagctttaacaattttgttcaaagagctgatttggggccaggtacaatagctcacacctgtaatcccctgactttggaaggccaacactgaaggatcgcttgagcccaggagtttgagaccagtctgggacaaaaaaaaaaaaaaaaagctgatttgggtctgtaatacacacagcactgtttgttcatatcttctcctcaaaaagacttaacatctgaacgatccatggaactcttactttctaacaatatgacacagcaaatattaagtcttgtcattagaatcatgtgaaaacatttacaactggccgggcgtggtggcttatgcctgtaatcccagcactttgggaggccgaggcaggtggatcacaaggtcaggagatagagaccgtcctggctgacacagtgaaaccccatctctactaaaaatacaaaaaattagccgggcgtagtggcgggcacctgtagtcccagctactcgggaggctggggcaggagaatggcgtgaacccagggggcagagctttcagtgagccgagattgtgcccctgcactccagcctgggcaacagagcgagactccatctccaaaaaaaaagaaaagaaaacatttacaactaatgatctttatactaagatggcaaaaattaggaggcatataaaatgtgagttgtttgctgacttttctgatttagttaaaaataaatctaaaagtaaacatgagctttgttgtataagttaacttattttgcaatattggtatgtacattttcctggtcagaaaaatgaactgacttgagagacagatgaaggagatttgtttggggcaggactatttcttagagcaggtaatgttcttagaattggatgtacaggagaaaatgaggaattcttgataacaaggactggtcagaggtttaggttgaggccggatgagtaggtggtgattaagagggaactttgatccagtctgcagccctggctgtctcctgctgagctccaggggccctgtgtttagactcgttctgtctttttatacagggcttacaatatcccttctttcctaacttgcctacactgtattctttatttgcagaaacacacagggacaactgctaccttctttccttgtttcttcctcaagaatatagtaatgtaaaaagattcaaatactaagaataggtgtggttcccatgtttaaaagacagaacacgatgttataccatttaactgttggctttttttcttgttttaatgcagttcttctatctgggatcatttacatagttttcctcatctgacaccatatatggtacttgtaaccttcaaatctgttggttctgcatccatggattgaaccaaccacagatcaaaaattatcagggaaaaaagtcacaaaacacataaaaacaataacatataacagcatcataccatacatattaacaataccatgtaacaatgccatttaaaagtattcttttaggttgggctcagtggctcccagctgtaatcccagcactttgggaggccgaggcacacggattgcttgagctcatgggttcaagacctgcctgggcaacatggcgaaacctcgtctctacaaaaaaatacaaaaattagctgggtgtggtagtgcgcacctgtagtcccagttactcaggaggctgaggtaggagaatggcttgaacctgggtgacaggttgcagtgacctgagattgcactgctgcactccagcctgggtgatagagccagaccttgtctcaaaaataaataaataaataaaaagtatgcttttacatgacatttacattgtattaggtattataagtattatttaaagtatacgggaggatgtactcaggttgtatgtaaatagtatgccattatataaaagggacttgagcatccgtggattttggtatcttcgggggccctaaaactaatctcccatagatattgagcaatgaccatatgctattattctagctactcacgttttccttagctttatttgctagatcaaacattgaatgaatttgacccatgtttattgatttctatgctttaattttgccctaaaattctgttttctaaagtagtatctaggggacatagttatgatttgtgcctgatatcatggttttgagccagaacaattattgaaaataaaggtaatctttaatactggaatatctatctgcagttgacagagaatttcaaaactgctgttcttaatgatgacgtctatgtatttctatatgtaaaattattcattaatgtttattctgtttaggaacactgtaacaacctctatgatgatgatgggactcatccgagcttaatctcaaatctcccaaactgttgcaaagagaaagaagcaggtaagaaattcatacttgtttttaagcttgaggatatcattttcatgttagtaaaacctagtataatatatgaaattttcaatgatctataatgccttagtgcttctgaaataacacgtgaatgaagaacagttgagaaggttagaatctccttggagagcctcagaattggtctgtccatttcatggatccatttttacttagtggtggtatttgtaaagaaaatttatatttcaattttattaacgtttaatatgcaaatttttacttggaaatctgttgccatattttaattggaaatgtgcttatcttctccattttgaatttgctctaccaacaattattttatagctttgctttactagctattatacaaataatagctgaatattatcacattaaaagattctagtatatgccttttagataagaaatatagcttaatttttaagttactctcatttattgtctaattatagaagatgaagaaaattttgaagcacctgcctttctaaatatgaggaagaggaagagagttacttttggagaggacttaagcccggaagtgtttgatgaatctttgccagcaaatactccattgcgtaaaggaggaacacctgtttgtaaaaaagacttcagtggtctcagttccctgctgcttgagcagtcacctgttcctgagccattacctcaaccagattttgatgacaagggggagaatcttgtaagtatgaaaagcgtggaacaagcttgccatatgtattttcatcaggcttcacctgctttgcatgagcaataactatgctttgaaataatgagatagactaaatgatatgccatggtttaaattaatctattttgtatgtaggtttttatgagtttttgcccattacaaataatacttccctgactccttgtacatattgaacagatttatgccaatgaatttaacaacttaggtaaactggatacattccttagaagacacaaattaccaaaactcactaaaggtgaaataaattacctcattatccctatatcaacttaagatatttaaattttagttaaaaccttcccacagagaaaactctaggtatagatgattttttttttttttttttttgagatagggtcttactctgtcacccaagctggagtgcagtggtgcggtcatggctcactgcagcctcaacctcccaggctcaagctatcctcccatatcctcccgtcttagcctcccgagtagctgggacatgggcacacatcaccatgcctggctagtttttgatgattttactgatgaatactaccaaacacttgagcaagttaaaatactaattctacacaagtgtttccacaaattgaaggggtaggttaattgatgtcagcattgtgatttcagcattaacctggtgcaaaatcagacaggcattataagagaagaaaactacagttcagtatccttgtaaacatagcaatatataaaaagataatacatcataaccatgtgagatttagccttgggctgcaaagccatttaatgtttgaaaaacaatcagtgtaatctgccttgttaaaagactaagacagaaatacgatcatctgagtagttgcagaaaaagcagcacaccaacatggcacgtgtatacataacaaacctgcatgttgtgcacatgcaccctaaaacttaaagtataataataataataataataataataataaagaaaaagcatttaacaaaatatagtatccacttctcatttaaaaaataaaacctctgagcaaaatggtaataaaagaatttcttcaaattgactaatgtctatgcaaaaccaacagttaatgtcttaccaacaattatgtggaaaagatttgctatctgtatttatattgccatcttactctggagttccctgaataacattataacgttagattgtgtttatgaatgaatttttaaattttctttataggagttagaaatttagcagtagatcattatgtgtactttcgcttataaattttcttagtagtttgatggattgcagttagtaagcatttcattgcaaacatgattggtaaatggtatacatatatttttctattcaatatctttgttttgctttgaattttagaatcttttattgattacccatctttatgcttattatagtttctcctaccaaaataaattcttactcttcttttgggcacattatgtattcactgcatttaaagatatctaacttctgtcttttcctttgtttaggaaaacatagaaccacttcaagtatcatttgccgttctcagttctcctaataaatcatcaatctctgagaccctttcaggtagtaacttgtttatcttaaaatcataaatgtcattttttatatgtgtatatgttgattatttttgttttcttttaaaaatttcatatttgttaccacaacatatacttggtttaaaaacacctaatagtattgggaagctgacatgaagctattcatccatcccttttccattccaagcctcatacttcataatcacccagaatttacttcctcagatggaatccccattttgttagttgctagaagcaatggagttagcctctcaactcttaagtatcaatgacaaactgctattcacagtttacagaattgacatctggattgtaaggatcattcttaaatatccagactttttcctcaacattcattgtggcgtttttagcacatgtgctttccaaggtctctggattttttatgattatgacaaagcaacagattgctcccagcttttctgacaaaccaggacttagctggcaggtgtcatgggccaggcacctttattcaggtgtcttccctggcggaaaccccttaatggcttcttgttgacacaaaccaaacctagtagactccaagccatgtgttactaagttagagctaaaatttgaatcacagtctatcacattccaaaggccatacccttaaacatattataccacctttcatttatatcattaaaagtctgccaggtgcggtggctcatgcctgtaatccctttactttgggaggctaaggcaggcagatcacttgaggtcaggagttcaagaccagcctggtcaacttggtgaaacctggtctctactgaaaatacaaaaaaaaaaaaaaaaattagccaggcatggtagcgggtgcctataatctcagctactcaggaggctgaggcagaagaatcacttgaaccggggagacggaggttgcagtgagctgagattgcaccactgcactccagcctgggtgacagagtgagactccatctcaaaaaaaacaagtggtcaaaataaaattttcctatcctacactttaaataaaatttaaaacaaagtattttcatggttatcttaatgtcctttattgcgatttcattatacaaaatgtatcgtggaataaatgggtgttcatgaaaatacatgcatttattgtaatgtgatttattctgctatcttagcttggtaatatgttaagcagtcaccatggaaagtggcgaaagtttctgagtatccagtaaacttaaaattttttaaaacaaaaaaaaaaaattggatttcaaaatttctgctgcttggctcctcttttttttgtttagatatggtattaaaggtggatatcctaaacacagtgtttccaaaggaagatgtatgttatagtttttggtttcctaccctgatttagcttttgtcttgtttatcaggcactgatacctttagttcttcaaataaccatgagaaaatatcctctcctaaagttggtagaataacaaggacttctaacagaagaaatgtaagtgtttgtgtttggcacaacgtatttgtttttaaatcgtgcaatatacttttctgttttcatggccaaatgataatgggtgaaatcttagtttaatcagtgtcattaagaattaatactttggccaggcaccgtggttcacgcctgtaatcccaatgctttgggaggccgaggcaggcggatcatgaggtcaggagattgagaccattctggctaacacggtaaaatcccatctctactagaaataccaaaaaaattagccggacgtggtggtggacgcctgtagtcccagctactagggaggctgaggcaggagaatggcatgaactcaggaggcggagcttgccgggagccgagatggcgccactgcactccagcctgggcggagtgagactccgtctcaaaaaaaaaactaatactttatcctacctagcatgtaacctataaggtgatagtgtgtttctgatttgattttaattctattagaagaaaaatctagaaagatgctttcagagctgtgttaacatggaagttaacaaaatttgtttgggatctatatgattttatgaatttcgttgaggtgaaaatggagaagatcagcatgtaattaacagaaccagaaaataatataagtataatcttttttaaattgtgcttcagtctgttttttaacactgggtttcaactgggagttatatataagcataactcccattgaatgcatgtcttttgctatttcgttaaattagataaaatttggatttttgtttataacatcataaagtataaacatatactgttatggggtatttagcttatagggttggatattaaacccaggattcaaacctagataatctaaaaattcatgatttttttccccataacccagtagttaggtgctaaattgtaggttcttaatgagtagttgatgagtgaataaattaacgaattcttaagctgttttttctttcttccctaatataattgggtaatatatgtatacttctgggtctgcatttgatagttcagaaattggtaattaccatttccaccaattttcatcaaagtgcttttaataaggtttgtgaattaagaataaatgggatctaaagtggtagaagcatcctgggaagcacaacaagagtgagagcagcacattaacatgtaattgcttgtgctttacggtatcctactttacactttctttatagcaattggtcagtgttgtagaagagagtgtttgcaacttattgaatacagaagttcagccttgtaaagaaaagaaaattaataggaggaagtctcaagaaacaaagtgtacaaagagagcacttcctaagaagagtcaggtaagcatgtgtttaaagatataataaagagtagaagtggtgtgtttccttattgtataattaggaaaatatagaaacacatttttttccagttgactttggaccaagattattaatgcaatcttaccgtggagtagaatggggtgggggggttatgtacttaactctgaattgcctaaggaacacttttgcgtcttcttcatcttcttgtgttgcgtacttcctgcacagtaaattaataggcactcaaacctgaaattctcattctcatctttgaatctaccccaacatattaccctattgggaatcctgatttttttaggcagggatgagtgtgccgcttgctacttcttagattctcttcttccagttgctgaatcaaatttttccctaaatttaagggaaagtttagaaactagctctcagtctttcttaacacttctggtcgtctcagatacccttacagtccatgtggttagccaatttaacaccttaacccagttccttttccttctccagctcagtgatctggactccacactccaaagccacctactcactcttgctgccattcttacaacttgttactgcccgtgtagcagtgctcattctctgacccccaacttcctgtccatccagcctattcactctcttactctgcagttccttctgtactgctaagctttcagatacacctgaagttcatgtttccctcttcatcctgaactgagtgaactgtttccaactcttgtcaggaatctcaattccggatccttttccttccacctcatccatccagcaaaatttccagtctgactgagttatcctctcttccatctgacatagcccctagagacactcacacaggagttggggatagtactactacacattcactgacatctggccttcttcttcaccactttgccgcttcacttcatttttaatactaaagccagtgcatacttttcagttctgttcttaatggacatcttagcatttgacatgatggaacactcctgtacagtctctaaggtttgttttctgtcccccattgttaaatgtttgtgttttccagaattctcttctttgcccttgtaaattgtttatcttctgggtaatttcatacacagcatggttaatgaccatatatgaagaccagaacttcctgatctgtaaatctgtgttcaactacgtactagacatctgtctttaaccatgctatgtcaaaatcagcatttctaaaactaaacttatcaacctatacacccacccaaaacattccgtaaacttccttccccctctatgaaataaaaatgactgcttttcttggttgagtagcacagatatccttaagtcattaaatccggaaggaactaggtgttttcctgctttagttcctttttaggtcacacactcttgataaaatgatgaaagattatcttgctgaaaaaataccattaattcaaaaatatacatacaacttattacattagaaattgatttccttcgtgtgtgtgtgtatatatattttaaagcactcttacaaagaatatacacctattcatataaaattacggccagaaagtacaaaaaggattgagcattaagtcactgcaatccctcccaggaccttgctgaattaataccatttaggtactaaaaggaatacacttagaatagcaatgagaggaggaaagggatgaggaggggtattgagaagccgacgacagccttcaatgaatttctagaagaccaagcagatgggagcatgttgacagataaaaaaaggtggaaagatttacagttcagaatgtgctaggagggagctagagaggagctgggagccggcctgttcatgggaatcccaggagaccctggcccagaattggcaggtacgatggatggtgagagtgagaggtggtactgaaaaacagagaaatgaattgaagtcctatacgtgggacagtttgcaccagttggcacaccagcctcctcccaccctgatgctcagaacagatgttgtcatctagattaaagccctcattctggcatttggaaagtcccacagtcttgacagccagctcttgccctaatgcaaatcctgacagttgaccctccagtattctgccccaccctaggtaggatttccacgcaggaaagagactgagctggaaagcagaggaaacctatataccaacttacccaatcttaaataagaaacaaggcaattgaatagaacaaatagcatgaaagtgaaaagaccaatgttaataaggttaaaaactgacttcagagaaataggttattcaaggaatagaaggaaattttacatacataaatactccactccaatttaagaaaatatcatctgcataaaagtaaggagatactatgaaaaaggaattgcaaaaacataaaatttagtagttggacaaaagaattaaagttaaggaaagtctcccagaagatagagcaaaagaaagactggaaacgagaatctaggagacaccataggactcttaggaaaaagaaggagaaaatagaatgggagaagtcatccaaataaaagaagaggatttcccaaaaatagaatggaagaaattattcaaataagaggatttcctagaactgaagaaaggagtcttcaagttaaaagcgcccactgaataactggtacaatgaagaagggccagggggtaggcctgtaactgtgaaactgaacaataaggataatgaggaaagtgggcttttcctacagagaaataagaaccagagtggcatcaagactagcaatagccggaaagctacaaaatcatacaagagttcatttaaagcttagaagaaaatttcaaccgagtattctacacccagccagtctcaattaagtgtgaaggaaaaaataaaagacatttgagtgtttctttttttcttttctttttattttgagagaaggtctcactctcacccaggctggagtgtagtgctgtggtcactgcttactgcatgcttgacctccctggctcaagtgatcctcccacctcagcctcttgagtagctgggactacaggtgcacgccaccacgcttggctagtgttttttgtttgttttttgtttttcttttgagatgaactcttgctctgttgcccaggctggagtgcagtgatgcatgatcttggctcaccacaacctccacctcctgggttcaagcaattctcctgcctcagcctcccagttagctgggactacaggaacgcaccaccatgctcggctaatttttgtatttttagtaaagacggggtttcactatgttagccaggctggtctcaaactcctgacctcatgatctgccttcctcggcctcccaaagtgctgggattacaggcgtgagccaccacgcctggctggctaatttttttttactttcttgaagcagcggggggttggggggtctcaccttgttgcccaggctggtctcagactcttcctgggctcaatcacttctctcaccccagcttcccaaagtgctgggattacaggcttgagccaacatgcccagccagaaagttatttttctttggatgctactggaggaggaactctagcaaaatgaggaactaagcttaagaattcaggacacaacggatctaacaatacaagagcgcaatcaaagggaaatcgctggttgtagctgttcagccagcctagaagagcaaccagtccaaatttgagcagggagaaggagctggagctaaaaaacggaaaagacctgtgattgaaagaatgaatggtatgaaaggtatgtcacataagaaaaaaacggtaattatataccatttcaaataaaagtctatataaaagttttagagtaaatatgaaggaaacattactgtgatttcaagcaataatgcagtataaggaaaagtagattttatagtgctaggaatcatctccctcaaggggcccggaggagaagaaaagagtatgaaagctgtacttggcagagccgtgaaaaatgtttgcagtcataataatacagatgctatttgttttcaactaaggacgaagcttttaacaacttggttgttgtgcaggacaatgtgagtattaacaatctaatgataggaaaatgtagttaatagcagaaggtgaaaagtgagttaaggtagaaacaagggggctaatggtgtgctggtaagagtgcagactctggaccagacccctgggtttaaatcctgggttcattcctgcctccagtgcaatgctgggtaaaattctggactctgttttgtttgtgtgtttgtttgtttgtaaaacagtggtggaaatggatgttagaagcttctgaatcttaatgaattcatgcatgctcaactcttagaacagtgcctggccatagtaagctttgtggtcattatcatcattatcatgagacattcaagatatatattttaaaatttaatgaaaagaaatagaaatataaaagttcaatgtttaccaactgaagagccacaattaacatagaaaagaggcaggtttggttttaaatgagcagttttttcatctttcatagcaagatgttgacagataactaaaattagattaaatgccacttctcaaccagaagtagcattagaatcctcaagagtaaattcctttataaaccagaaatggagaaagttcccaaagtgtgactcaaaaaccagaaacagtgagggcaaaggattggtgaatttgatatcttttgaaccatacagcatggagcatgcgtaaggaaaaaaatccccataagaaaatttaaaagacaaagaacaagcttgggaaaagtatttgcaactcatatcagacaccaaggattaatgtcactaatatttgaagagcttctaaattacttagaaaggaacagtcttcaaaagataacaaaacatttacaaaactgaaatgaaaatgaccttcagcacaggaagaaaatgttcagacttcctcatcataagagaattgcagctgtaacgtgcattgagatgccgtttctcaccttttagattaccaaaaatctgaaagttgacagcatactcacgtggtaaggctatggggcaaacaggcacactcatacattttctgctaaagcagacctctgtggaggagtatttggcagtatctggccaaattaaatactcatttgtcctttgacccaacaggcctatttctaggaatccatctcaaagatccactgatcaaaatacaaaaatatatgtttatttattgcagcattctttgtaaagcaaaagactaaaagcaaaccatatgctcatcaatatgagacttgttgaaaaaactatggtgtttccacaaagcgagtattaggcagctgtagaaagttgtgaagagaacttccatacacttctatacagtgatgccaaggggacacagatggccctctatatactgttgtccagcatctgtggttggttgaatcaaaaacactcagggctgggtgaggtggctcacacctgtaatctcagcactttgggaggctgatattggaggattgcttgaggccagtagtgcgagaccagcctggtcaacatagcacaaccccatctgtattttcttaatatattacttaaaaaaaaaaattcagaaaaacccaataacaatacaacaattaaaaaaataaaaattttaaaatacagcatattaactatgtagcatttatattgtacttggtgttaagtcatctagagatgctttaaagcatagttattatgctgtatttttacagtataatgctgtaaaaggaagtttacatatgctctatgcaaatactgtgccattttatgtcggggacttgagtatctgcagatttttggtatccacaggaggtcctggaaccaatttccctacagatactgagggatgactgtgtttactgttaaaatgaaaaaagcatgttataaaacaatatatgtggtcaactactggttatggactgaattgtgtcccttcccaaatttatatattgaagtcctaactcccaggatctcagaatgtgactgtatttggagatttggtctttaaaatagttattaatttaaaatgagatccatagggtgggtcctaatccactctgactggtgttcttataagaggaggaaattcggacccacataaggacaccagggacgagtgtgcattgagaaataaccatgtgaggacacagcaagaaggtggccatctgaaggccaaggagagaggccccaagagacaccagccctgccaacaccctgatcttgcactgctagcctccagaactgggagaaaattagtttctgttgtttgaactacctagtttgtgacattttattacagtagccttacaaactaatacattaccctttgtctaagaaagtagagtacacatatagttttgatttttcagttgaagaataaaccaaagagaaataaaaaactggctatagggagaagggaggagacaggagagaatgtgaatgcaagctagacttcgttaagtgtgtactgtttttcagttttgattgtgggaccatttaaatgttttacctgactatgaaacaaaactaaaactagtagaaagagaacaatctctaataagcgaaagcaaaatttgacaaattcttactatgtcaagttggtggcttaacttcattaagaattttttcaaacctagaaatttgaatataagtgggataaatctttttttttttgagatggagtcttgctctgtcacccaggctagagtgcagtggcgtgagctcggctcactgcaagctccgcctcccgggttcatgccattctcctgcctcggcctcccgagtagctaggaatacaggcacctgccaccacgcccggctaattttttattttttattttttagtagagactgggtttcaccatgttagccaggatggtctcgatctgctgacctcgtgatccgcccacctcggcctcccaaagtgctgggattacaggcgtgagccactgcgcctggccctataagggggataaatcttaaggacaaaaataactgcaaagaaattataaacagtatgaaacactcaatagaagcactgaatttagaataaagcaaataagcaatttttcccatcattaagaatcaagatgtgcactcagagacaaaagatatatttttaaatccaacaaatttaaaactttggaagactaaatttgaattggaaataagagtagaaactcattttattttccatttaaaagaattgtccagctctatccattgataaagcttaaaattcatgagcatccctggtgcatagattatcattagacataccagttaaaaggggttagggtcccttggtgaaatggctgctttcagatttacaacaacaaatttaataagtgagcctggttgggtctgtaccagagtacaaggaaggatgctaaaaaaaactactggtgtcatgttaacagacacaaatccatcttcaagggacttacactgaccagatatgatcatcagcattgcaaagcattgaagtacaatcatgaaataacacataagtttattacttttttttaattaatggacactttagaagcttgctaggatacccactcatttttctgataacaggaaaataaaatttgagctctatttcaggtaaacaaatagttgatgagggaaaagttgtttatagaagaatttcaggtaataaaagaaatgctcaacaaagctgcttaaaacgtttgataaaaggctgatgtgacatagtaacaatcaacagaggaaagaaacaccgtatagaatgggagaagatactgtaactacaaaccatacatctgataaggggttaatagccaaaatgtataagaaactcaaacagctcattagcaagaacacaccaatttaaaaatggtcaaaggtccagaatagacagttctcaaaagacatgcaaatggctaacatcactaatcatcagggaaatgcaaattaaaaccacaatgagatatcactggctattatcaagcagatgaaagattacaagtgttggagaggatatggagaaaagggaatcctttgtacactatcaataggaatgtaaattgctacagcctgttttgattggcaaagtcaactaaaaatatagaactgaatctctaaacaaaatgttttatttgggaaaacgtaattgcagtttggggcaaacacacagaccgaggtggtctttgatatgtcctaagaacgtagaaagttggggtttttagtagaaaaagaaatgttacatattatttagaaaaaaaactcactggccctaagcaaaattttggggagctggtaaactctggtgagtgatggtggtagttaaatttagtcttacagtcccaagtgctttttttcccctggtctctggactctagttgtttatgacacagtgactccaaataatccattttcacaagccattgtgggaaacattacgggggttcctcaaaaaattaaaaatagaactaccatatgatccagcaaatcccacttctgggtatgtatccaaaggaaatcagtatatcaaagagcgataaccaagttacagactcaagctgagtatccatcaacaggtgaatggataaagaaaaaatatgtgtgtacacacacaacaaaatgctattcagccttaaagaaatcctgtcattttgacagcatagaaggaccttaagggcattacgttaagtaaaatagtccaggcacagagagacaagaagatcttacttacatgtggaatctttaaaaaataaaaaataaaaaaaaaaaaaactcacagaagctgagaatagaatggtggttgtcaggggggctagtggcttgagtggtgggggatgaggagatgttggttcaagggtacaaagtttcagttaggatgagtaagttctggagatctgttgtacagcatggtgactaggaaataataatgtatatgggaaaattgctaagagatgacattgtaagtgttcttgccataaaataattatgtgaagtggtggatatgttagtttaatcatttcccaatgtgtacatatgtcaaaacctctcatccaccatgctatatgcaatttttaatttgttggttatacaattgtattcaaatttgcccatcaaaactgaatctaatcaagcttctagatctaattaccaatttataggacatggaggaacatagactcacctactgtagtgagccaaatctaggacttggctaattctataggaaaaatgcctcaatttactcaccaaataaatgtcaagggaagtaaaaaaggagccatagaataaaagagactaaaagacatgaatcaaatggtatgtgtggagatcttattggggtcctgattagaacagttgttttagaaaaagaaattatgggccaagggagaaatttgaactttgaggagatactagggaaaattgccatcatggtttttgtgttttgttgaattacattttgttttgttttgttttgttggaatggagtctcgctctgtcgcccaggctggagttcagtggcacgatctcggctcactgcaacctcctcctccccggttcaagtgattctcctgcctcagcctccccagtagctgggactacaggtgtgcaccaccatgctcagctaatttttgtatttttagtagagacggggtttcactatgttggcctggctggtctcaaacccctgtcctcaggtaatctgcaccccccccccgccccccaggcctcccaaagtgctgggattacagatatgagcctctatccctggtgtacattttaagttttgtgatcattttggatacacacactcttctaagaagtaatgcagaaagatcccaagtaccctttacctagtttcccccaattgtgacatcttgcgaaaccatagttcagggtcgcagccaagatattgatacagccgagatccagacagctttcccatggccctttgtagctacatccacttcctacccataaccccgcctcatcccctggcaaccactaatctttcttcattcctacagttttgtcatttcgaaaaggttacccaaatggagtcatgtactgtgtaactcggggactggctttttcactcagcataattctctggagatttgtccaggttgttatgtgtatcagtagttctttttattgttgaaccatatttgtaattgtctctaatagaaaaagaacctttaactcttcaagacactgcaggattttcagatgaaatgatgtgtaacgtctgggatttgctttaaaataatctggggttaggggagtatagatgaatcatgatttctatgtgctagtaattgttgaagtagctgatgggtacatggggttctgtactttttgggtgtttgaaattttccataatcaaaagttaaaaatatagcagtatgagccctttatcagagagagggagctaactgcaagagctaaaagtggagccagcagataagtaagcaccaggggcaggcaagtgtgtgcttgatcaccgtaacctctcctatatggtgtgatttgttgccatgtccatgaattttttttttttttttttttttttttttgagacagagtctctctctgtcacccaggtggagtgcagtggctcgatctcagctcactgcagcctccgcctcccaggctcaagtgattctcctgcctcaggcttccctagtagctgggagtacatggcttaccaccacacccagctaatttttgtatttttggtagagacggggtttcgtcatgttgcccaggcttgtctcgaattcctgagctcaagcaacccacccacctcggcctcccaaagtgttgggattaagggcatgagccaccgtgctggcctgaattagtttttaaaaattttaaagctattctctgaaaataatttaaagaagtcttaattatgcaaataagacaaaagataaacatttacttctgcctcctgacctccttcactgtgtgagaagaggaatcagtgattttggagtaaacgaaattgctttagggacaatcccttcagttgttctttggcgattctaagccataatccaccctaaccatttattgatcaaatggcttcccccgggggttccaagcatatacaacttcttctgttattacactatcagcaaggcttttgtactgtggtgaattcagattttgataagtttgtggcctttgctgatgaaatcttctcatgactaagatcagctctgccagatgtattttcaggacagacagacaaacctgaggtgctttaattgttcttttttgggagaggtggggtggtaatatacttctcttggcccatgaccatgaaaaaacagaaatttagtctttcaatcatgttgagcaaattttatgtaagcttaactgtacttctttgaccattcattcattcattcattcgtatttgtggagtagccactgtgtgcttggcactgttgtagatccagggacataacttccaaaatcatgtgaagaggggatctttttttttttttttttccccatatatcagaagctattctggcgattataatctggtggcattgcccacagtgtattaactgaccacactgggtctatgccctacaataatactaataacataatttaatattaaaaattaaaagtatatgaagtaatggatatgttcattagcttgatttaatcattccacagtgcatacatatatcaaaatatggtgttgtatgccatacgtatattcaatttttgtcaattaaaacttttttttctatcttttaaaaagggtcactctgttgcccaggctggagtgcaatggtgcaatcataactcaccgccgcctcaacctcctgtgttcaagcagtcctcctgcctcagcctcctgaggagctaggactacatgtgtgtgccaccatgcctggctaaaaaaaataaagttgtcatgtttttcctcatattaactctcaagtaatggaaaagaatttgaaagaacaagatagcttttaccatgggtcaggccctacattaaccagctctatcacatgtcaactcatttaatattccccacagctttatgtggagtgtgctgttgtgatttctgttttgcagaggagaatgaggtacagaaagttgacttgcccagggttataaaacagttaagtaacagagtcaagactttaacccaaagtatctgccaccagaggccattttttttatttatttattttttgcaacttatctgtgagccccaagttaagatttttcttttctcttggctttcaggttcattgaccaagccagcatttccccaactgttccacggaatgtcaacagatgttccatgaaaaaaatatttactggaaaaatatttaacccagcattttcctaatgtgtatagagattatttatactgtggacttctcatagaatttcatgttaaatgtacactgtaaatcaccaggaggaacattcatcttgtacagttctaaaattatttttccgtggaatgttttgttttcacaggatatctatagatttctcaaggagcacatagttttgtgccatttctgtactcttgaatctcaccattagtttcacctatatattctgtgctgtcacccaaatgacctttcttaaatttaagatcaaacgttgacactctcgaagtcaccatgcagtgagccttcattgctttcattcaagtcactggcaagggctctgctcctgccactcctgcatggatccacgggccgggccatgtcttgctgcatgcagccctgcacctgtgctgtgctgtctcactttgagttcatgcacatggcattcccttctctttgaagagcctttctgcatcgcccccatagtaggccaaaacagcccttgcttgtttgagatttgacttagacattacattttccgtggagccgatcttgaacacctcctacaggccaggtgcccaccttcacagttcacacagccagtcatggtgcgtgtgtatggtcactcctttactttacaccagcagctccttgaagaatacatcctctttgcttccagatcccacacctggcaagttattacctggcacacagcagtctcaataaatgtgtgaatgaattccactttccagatgtttgtttttgtttttgttttgttttgttttgtttttttgagacggagtctcactgtcgccaggctggagtgcagtggcgcgatctcggctcactgcaacctctgcctccctggttcatgcaattctcctgcctcagtctcctgagtagctgggactacaggtgcgcaccaccacgcccagttaatttttgtatttttagtagagacggctttcaccatgttggccaggatggtctcgatctcctgaccttgtgatctgcccacctcggcctcccaaagtgctgggattacaggcgtaagccaccacgcctggcctgtgttaattgttaatatgttttatgttggccctaaattctggttctcttcaacattgtcacattgaatatatttcattcctttcgcccataacagtctgtctttctagtatttcagtacagcatttccccaaggtcttttccatatgaaacttttttaaaaacataaaacattatttcttggttgctgatacgttactcagaattgaatgtaataccccattccggatattattaagcgacttttaatttttatggaaacctacattttcagtcaattaatgtcagacctttgtcttccatcttctgcttgtgcttgttaaaatccattttgtttgactgaatcttgattaagtcatctgttgtttgaatctgcaggttcagctagctttgtgttttcttcatattttacatacacacctcctgtttcttcatccggacctgggagcataaagcagtctcccatagcttgcagtatgtaattcacactaggttaatcctgagtcatcacaactgtgcgtcttacagatatctcatgacattatatctgtgcagttctaaagcatcttatatattttttcatttatccagccctagttttggcaagtgccttgtggaaatgtagaaagctaccatacaatttataaactgaatcctgctttgtagtttatttgactttgtggaagttacctgacttcctaccctcgatttagatgcttacaactttaaatgaaatataaaagttatctatgcaataaagcactgtatgaacaataattagagatattatagaagttgaagggtcagactgggcattgtggctcacacttgtaatcccagcactttgggaggccaaggcaggaggatctcttgagctcaggaatttgtgacaagcctgggcaacgtggtgagatcccatctccaccaaaaatacaaaataaaaagccagtcgtggtggtatgtacctgtggtcccagctacttgggaggctgagatgggaggcttgcttgagcccaggggcagaagttgcagtgagctgagattgtgccactgcactccagcctggatgacaaagtgagaccctgtctcaaaaataaataaaaataactagttaaagggtcaaaattttacatggtgctacatctttctcaattgcaatgttttaatgcattttctcaggttttaaaaagttgcagaaagaagaaaggaaagggaaagaaaagtgttcagaaatctttatatggggaaagagacattgcttctaagaagcccctcctcagtcctattcccgagctgcctgaagtccctgagatgacaccttccattccgagcatccgaagactgggttcaggtatcctgacattttcctggtagttatattttatcttttctcttcaccctctttgttgctattttacttttttcacttttttcccattcactatgtaaagagtacgtaaattttaaaaagcaatgtttcctcacattaccatgaggatttcaaatggaggaaacagtcacgtgtaacttgtaggtgacttagatccttttcagaatctgatggaaactggatcctttccccaggaaaaccgagacacaagattttgcatataatatcagtaataatttctgtgcatcctgtttccttttgttttttaaagcattttgtgaaaataaattccatttggtggtgtagtccatcgttgaaagtgaacgagagctggggcacctgcctgtgatcccaaccatttgggagcctaaggcggaaggattgcttgagttcaggagtttgaggccagcctgggcaacatagcaagaccccatctcttaaaaaaaaaaggaacaaaaaaagtcaatgaggtgatgattcagtaatatgtataccttatatgagttaaggacaatgatgttttgttagagttggcactactgttttctaaaaataatacatataaattgagcttgattaccttgaaagttattttattatcaagtcagttgatatatggggtagataaaaaatggactggaattgtttctggtttctaatgcccaaattttaaatggactgaatcttgctgaaaataataatgatttttttttttttttttaatttttagtagagatgggtgtccctgagttgcccaggctggtctcaaactcttgggctcaaacaatcttcctgcctcagcctcccaaactactgatattacaggcaagagccacgctgtcttgcctgaaaatgataatgtgtgtccatttggtgtgttgatttgtatagaatcatttttcaaatggctacctttgtcaatcatcagatatttatagcctacctcctatttgcggtataccatacaagattaataatagacttgaggatgaatgaggtacatgccaccattgactcctggcttctgcgtcctgcttaacattaggatagcacaggagtttaaataaacagccacccctctgtcgcatacgccctggctcacactcttctcctgccatgctttctcacaggctgtgttgtgacagggcatccaccactctacctttaatctgacctaatgttgcttatcttccaagattttgctgtattgtctgtttttccaggaatactctgcaacatacttccatcacctagttttatgatgatctattttctatgttcccctgctccctaaaacttcagtctccttgagagtggaaactaagtcttattttcattacatctctagttcttaacagtttttcaaaagatgattaaacagtgactgtagtaaaattttccatgttgtatcgtattagagaatttattttttaaaatacctaaagcattttttgtctgtaaccagtggtatcacctgctacatgggtttaaagcaattcagctccttgcttcctttatcttctctatctctttctctttttcctttcctctctccctatatcttctttaccttccttctctagtatgttggattttatgcgaaatacatatctttttgtttgtttgtttgttttttgagatggagtctcactctgtcgcccagcctggagtgcagtggctcaatcttggctcactgcaacctccacctcctgggtaccagcaattctcctgcttcagcctcccaggtagctgggactacaagcacgcgccaccatgcctggctaattttgtatttttagtagagacggggtttcaccatgttggccaggctggtctcaaactcctgacctcaggtaatccacctgcctcggcctcccaaagtgctgggattacaggcgtgagccactgtgctcggccataaatatcaatttttaaagctgtctaaagagcccaactaacattggttggcactgagtgggcactgacctgtttaatctctagctttaagtgacatgattttaagtaccttaatcatggatatatttttaaatggaaacattgtttttttagacttttggctcaacttatgttttatactttttttagtttttattttatttaaaacactttattcatttgactggccacttaaaaatatcatctgaggtatcaaaaaagattgcatctaatagttagttctaagatttagaactcataaagcctgaactcatgtgggctgtgttacttaccaatctgatgatggtttttccacctctgatgtgccagaaatacatgaaagcctacccacacgtgtcttcctggaggatatttagtcaaaggctgaggaattaagggtcgatttttataatattgaaacaaacctggttctgtttcggagtacagtgcactttatagtaatttttaacaaagggcatgagacctgagtgtcttcaggcatgctgttttagctcataagtcctcaaataccccagaattccaaattttccctcccctgtttcggaggatacattggtagaaagtttcagaagcataatgttgcccatttgcagtcattcattttcagggaaatgggaaatgtcactgcctcatactcatggaccttgtagcacgggaagggtgttagaatggaggaagctgtttcagatgctgttctcattttcatggtttgaggttatatgctttattaattcatgcgttgaatacctattttcttaacctgtggatcgttggagaactaaaagaggaggaggaggatgacagaagggcaagcacagtgtaacatttgtgggtcttgtgaatgcttaaaacacaaaaacaaaacaggtcacctgattatttaataaatgtaaagttcattcccattgttactttttaattagatttaaacctatttacatgcccataggttatttcagttcaaatggcaaactggaagaagtgaagactcctaaaaatccagtgaaaagaaaggatcttttgcgtcatgacccagatttgcatatgcatcaaggctatgataaatatgatgtctctgaattctgctcttatataaaaagttcctcatcgcttggcaatgctacttctgatgaagatccaaatacaaatataatgaacattaatgaaaataaaaatattccaaaagcaaaaaataagtcagaaagtgaaaatgaaccaaaagctggaactgacagtcctgtttcttgtgcttctgtaactgaagaacgtgtggcatcagatagtcccaaacctgctctgaccctgcagcagggtcaagaattttctgctggtggtcaaaatgcagaaaacctttgtcagttctttaaaatttcaccagatttaaacataaagtgtgaaagaaaggatgacttcttaggagctgcagaaggaaaactgcaatgcaatcgtttaatgcctaattcacaaaaagactgtcattgtttaggagatgtcttaattgaaaatacgaaagaatctaaaagccagagtgaggatttgggaagaaaacccatggaaagtagcagtgttgtgagttgcagagacaggaaagatagaagacgttccatgtgttattctgatggtcgaagtttacatttggaaaaaaatggaaatcacacaccatcctccagtgtgggcagctctgtagaaattagtttagaaaattctgaactgtttaaagatttgtctgatgccattgagcaaacctttcagaggagaaatagtgaaaccaaagtgcgacgtagcacgaggctacagaaggatttagaaaacgaaggtcttgtatggatttcacttccacttccttccacttcccaaaaagccaaaagaagaacaatatgtacatttgacagcagtggatttgaaagtatgtctcccataaaagaaactgtgtcctccagacaaaaaccgcagatggcacctcccgtctcagatccagaaaacagccagggccctgctgctggttcttccgatgaacctggtaagaggaggaagagcttttgtatatctacacttgcaaatactaaagccacttcccagttcaaaggctaccggagaagatcctctcttaatgggaagggagagagctctctgactgccttggaaaggattgaacataatggagaaagaaagcagtaattgacatttcctgcagagtctgtggcaagagggaaagtaaccatctatgctgaaatgatctgtctagttcccattctctgttcaacctcagtgtttcaaaagttcctaataaataaactcatttgagttgaacctacttttatgtagaaataaataagtttcttcatcattcagatagaaaacattctattaaatatattcttcttccgccagagagtaaatgctttattactactttgctaaaaaggttatttttaggcacaagaagacatctctcaatttttagacttttttttagcatatatatttttaagtacatatttaccactgaagtcttagactctgttgttagaagcatcttttagaattggctgattttatctggataagaggtttgtttttttgtttgtttgtttttcttttttttccccacaaaagataaattgatagaattaatggaactttatgaaaattgaaggaaatataaacttgaagacttaaagcgggtaagatatgtatttttctttagaaaaaaaaaacctggctataaattttaactaacaaaagttgaaattataaaacttgttttccttttggttaaatttaagagaagacttgatgacttgttttatctgtctcaaatgagatttttattttaatagtttaaatcctaaacaagaaatttcagaaaattatttcagtaaccacaatcttataaattcatcattataaatgaatatataatttagaaataactctgatgtgaaactattcattcctttaaacaagattcctttatattttgttgtgtgttggggggaggaattttttattttttattttttatttttggtgaaaatatagctcagttaaagactgggctctcagattattctaattagtcacaggcagtttgggacttaattcatggttttccattaaaagttttgaaaaccaaaaactcactgataaaattagtttactaacctgaagtgtggcagtaggtcactgattttttaacactgagttttccagcggttctttttttttttttttttttttaataatatctggcacttgacttggtttctctagcttttgcaacatctcctatggctgttttggtgatagcagtttgaaaaactaaattgctatatatctggaatttatgaatgcacataaatcattatatcattaaacaattgtctttgaaatcctttaaatcattaaactccccctctccatgatagcagaaacatgttaacaaatagagctctctataaataacacagcagggaagaaagctcccgctgggcacccatttcccccttcttacatagagactatttgttaccttcttggcaccggcaggtctggaactcctgctgctaaagactaatgtattttacattaacactcaaagtgatccccaatttcttctgctcaagggtggattgtttttaaaattcttttatctttacatgtaaattatttatagactttttttttttccatttctagtttggtgtggttggcaaatctctaccactaaaaacaagctcaccactccccccaccccaaaaaaatgaatgaattagcttctctgaagctttttcgttttgctgattttaagagaaaactttcagaaacctaataaaattgttttgcatttctaccttgtctaatatgaagactaacaactaactattgattgttatttcactccctgttttctatgatgatatatgatcacaattgtatttcaatttttaaaattacacatgctttgttttatttctcaaaaagtgctaatgagaatgagggaaacatttccaatctgtgatttgggcatggtttttcaaatgtgaaatgttctctttttctagcagcagttaaaaatgtaaacacaccgttagtttcaaaatgtttcattataaacattttgttgacatttgtcaataacaaataggcatttttcctaaaaaaaaaaaaaaaaatctgaaaaatcaaagcaagttagatgcagttttatctaccaggtctcatttgtacaagatgtgtaaaacattaataatttctgtatttggtcattcttgttttttgttttgttttgttttttgttgttgttgttttcccatttgttttcattcatggttaaatcaaaagcttggcttcaaaatggttttttttcctgccatgttttttcgttgcagtaactaacccttgttcttccatcatgtttctgttcctgtagattcttgtttgttccagaagatggcagcacaacctctgaagtttttccttctctgtgcataacctaatggctgttgcctgtgtggccccctatttttacttttttcttacataagtagtatgtatcaattgaaaaacacagaactgtacggaatttaaaagtggaaatatggcatctatcttccttgcattccacgcaggtgtcatccagccacaccctcctctctgcagctctctctgcaagcacttaacacctggcatgcaccttccagacctttcttgtataaacatgcatgcatcgttttgttgttttctaacaggatcactatatgtgccattctaccacttggtttttttaattcaacaaaatgccatgagtatcctttagtctttttatggacagccctagtgctgctacttcagtcttttttaaccccttcatataccttgaacatctgtaatgaaggtggtcatctccttactaatggatgaatgtcagttatctccagcttttgcaattatagcagtaaatgtagcaaatacaaagccatattgggcttgttgaaaatatctgtaagataaattccttgaaattaaaatgattacgttctcttctgtggatcttagctggcacattccccttacacacattttggcatccttgccttctttctgcctctcattttctgttcctactacttaatgccattttgcttccatcttctgtcactactgcctctacttccacttaagctgcagaattgagggtgggccttagacctggtatgtggaggagagaatgattaattatacctggttcatgctttagattgaaagagctacctttcaaagtcaagtttattgaggtataattaacctacggtgaagttcgcgtttttaaagcatccagaattttggcaaatttatacagccatgtaaccagtgccacaatcaagtaataggacatttctgtcaccccaaaattcctcccacctctttgtagtcaattttctacctgccaaccccgggtcttcacaactgctcatctgatttctagtgttacagttctgtcttctccagaatgtcatacaaatgagatcatataatatatacccctttgtgtctttagcttagcgtaatgcttttgagattcacccatgcttgcatgctgtaagtagttgatacttgtttattgctgatacttgtttattccattttatagatgtaccaaaacttgtttatcagtttaccacttgatggatatttcgattatttctggtttggggctaatgtgaataaagctgctgtaacaattcacatatggatcattttttatagtcacatgttttcatttatcttgcataaatatctagtggtagggttcctgggctgtatggtggtagtattaatatatgtttacctttttaggaaactgctaaacttttccatagtggctgcatgattttgcatttccactggcaacacgttttgtttgttccacatcttcaccagcctctggtattgttagccttttttcattgtagccattctaggatgtgtgcagtagtttctcatgggttttgatttatttctctaatgactaatgatattgaacatctttcctatgcttatttgccatctttatatcttccttgttgtgatgtctatccaaatttcttgcccacgtttgttgttgctgttattgtcttactgttattgagttaaaagaatctgtacatttggatacacatcctttattggatatgtctcttaaaatattttttcccattctgtggcttgtctttttatttgcttagcagtgtcttttgaagaacagattttcattttgatgaagtccagtttaccttgtttttactttaatggttcatgctttttgtgtcctagctaagaaatctttgtctaactcaaaggcacaaagattttctcctgtgtattcttccagttctatagttttagctctcacttaagtgttagatccacattaattttcttgtgtgagatgaaggtgggttatttatttttaatggaaatcattcaacaccatttgttgaaaagattaaccatttctcattgaattacattggcacctctgttaaaattatttgaccttatatgtgtagatctatttctggacattattctgttcatctgtatgtctattcttctaccaatataccactgtgactatataagaaagttttggattttttaaaatcatagtttaggggtttttttggagggtagagaggaggccagaagaagcaaaaggttgaccagccacatctgtctggggccttcagttattcccagacttgtagtaccatttgggtgcaagaagtgaagccagcaatgacaggctatcagagacacaacaaggaaaccaacttctctgggtgcctctgcgttcagcctagtcctctggaaactagtttactatggtttatgatttaaaatttgaccctaagttactaaaagattcagtcatcaagaagtaattctctctctggacactactctgtatagcagtaagaaaataaggtgaattaaaataagattcaaaattcaatttgctaaaaaattacctaataagcatgactcatttattttcataaattgaagtttgtattatagtttgatttagtgtaaaacttagccaggcatggtggcttacacttgtaatcccagcactttgggaggccaaggcaggaggattactcgagcccaggagtttgagaccagcctgggcaacacgataagacccttcctctacaaaaaaaaaaaaaatttaaattagctgggcatggttggtttcagctactctggaggctgaggtagggaggatcgtttgagcccaggaagttgaggctacagtgagccatgttcgtgccactgcactccagcctgagtgacagcgagaccctttctcaaataaataataaatgtcactgtccttactcagtaaccttagcatttgaggattgtttcctaatgtaggaaaattttcctgcaccagctcattctaggtaggcagattatggactcattaataaaataatttgccagccatttattcaacaactactatgtgccaggcattaatttctaaataaaattgctttcaagatgctcagttttctttctgtaaggggacaaaattacaatacagggtatgataaaaaagagataccccaacctgtcagccctccagggggtatcaaccttcagatcacgcaagtttagtttctttccagaataagtgatgcttgagccaaattcactaataggagttttagaggaatggggacccaaaaggcacatcccattccaaatctcctttgattattattcaataatttcattattcattaaactgagactaggtgatacaggctggcttcatctcatgtttttcttttaagtattttttaactttcattaaattctaacctataaatacatctggaaaagcatggatttgaaactagactacaagttgtgaattgtacctaaaattttaaagaaacctgctctgttctcaattgcttaggcatttctgtctcatactattgggtgtctttgtagtgtgtctaaagggtttcactgtgggtttggagtcctagaccaagtgagtggaattgggattaaattacagcaaataattgtacatcccccttttggggtgtcttaaatttatttgaagattattgcatagccttgatttagctctagaatgggttaattactaacatactatggcctaatagtttcaagtttgtctaatattgtgcaggtgtgttcatttttgcatattctttgatgcttttctgtttatgaaattgtgttacagactgcgagtaacatagcttaaatgagaagataagtaattactgcctttcaactgatacatatttctgttccacatcttcaaccaagatcatacttagcctgattttgatatgaccttaaagatttattagaaaggtttttagaaatttctaggcaattgagaagcaaatattttctgaaactgcttttaattttttgatactttgtaagcgttatatctcttacatgaaaagagaaaataaataagcatttacattaaagaagaatacaggtttgcattttctaaagggtaagttgggatttcatcacaaaatttccggtgaccacctggaaagctgactaagtctttttctcatttatcctaggcatacaaattgactatcttgatttatgttctgtgataataagttgccttcagggatgcaaacagctaacattttggttttagatgtaattgaagaaatgtcaaattatcttaagtttttgaagttccaaattcttaagtgtatgtgtgtgaatttttaagcttggaatttaaaagtacatatatttgccatatctaataatttattctcatggtttattcactgtcttaaagtttgctttaaaaattcttccactttgataatattttataatgtcaaatacagtgatctgatactggcatttcttttgcttttgaaaaacaaactgcattcccagtgttctcatatcccaggtccttgttgaaacaaggaagtaaatgtcaataatttcttcttttttcacatcacataactgctaagtagcaggtgcttgcaaaaataggttcatccctatgtctgattcaaacatgggaataatttttcagtataaaatgggggtcaaacagttgaaacgttatagagaagatgagtaaaatgggattttttcagttcaagtacatttagtttggatgccaatcactcgaaagtaaaatgtaagattttctgcctaacgtttgtacaaaatacagtatgtccattttctaattgttcacaacagaggaataatcaataaagcagccagtcttgtcttttcttttttaagtaaacgctgggaatgaagattgcagaagtattccctgactcaaacctgaaaaacctggtgttagtcttgggtgatttccagtgaccctctgcctcccttcttcctgccccctgtgtagatttggaaccgggcagccatttttgtttttggaagggaaaggagacagatataatgaatggcttttattgtgcaatatttcagactctcttgaatgcattcgaagggatggaaactgttctgccctatgtcatagccaaaacaaacaaaacatattccctaaacctggatatgtgtttctctcaaactggctgtagttaagagttcagctctcaagcaagaattcggtttgacaatttttagcccttgttcaactgagtattcggataggtcacagccaaagcaaatactatggggaaaaattaatgcacatatttacagcttgcaggtggcattctttctaaaaagttggagatttgtcttaagaaattgcatttgtggtaatacttttaaatagactactttttgcaaatattttttaaatgaactctgataatagtaactccaaatgtaaataaattctacagaggtccccaaagagtgataaatgcttgaatttaagtatttaaacatttagagaccactaagaatctgagaattctagaaatatcagacccagcgaatatgcaccaaaacccccttgacagtagccttctaccgtccctaaggcctccactgtaggaagcatcaatggctcctttctgatgcaacccccagcattgtttactgactccaacccccctcacttaggctgttaagtgttccctgctttggatctgcggggagaacatattctacaccatcaagatgattcattttgtaatgtgccattgtgcttcatgaccctgacaaaatatatttattattggtcacaataataactttgaatttatggttgcctataaccagctggctctcggtttgtgtcttaaccaagaaatacgggaaacaaattgtaagccaggcagcctgcctcgcataatggtagcaaagacttcaccgttggtcatccctttgaaacataaaattctagccttcattgaagttttgctgaacaatattagacacctgtgtgagtggaaataactggaaattctgttggctgctacttttccatctaataaacagcagatgaaacggcccacgtcttgcatctcagaagcactgcatggcagtggaaagataacctcttcccaagcactgagaggtccaatgatattcctgtaaaccagcctgactggcacatcctgggcatataaagagtttcaagcagtgcgtgttgagtgttttgtagtttgtcatgagtgggtacgtgggtattgccaagatctgtggctcaggctgtcaagaggcgaatgtaaatgtgagggaggaggcactagagtcttggggggaaaagcaggtcccttttcaacttgtaaatgttgctttaagttcttagtcttcaaacttaaatgtggtaggccatagagttctttctttgggtaaaaggactaattgaacactttggtttatccaagttctgccttactattttttaaccttgtgacagctgaagggatccctttaaacctaaataaaattttcgggtttaaaaacaatttaccttctccagtcaaatttaccttctccagtcaaattggagactcttaaacaagtcccactgtggctttctttcccctcagagacagagggaaacaaccggctttcctttaaataaatatcctgccccccttataatgcttaatctagactttgtctccccctgcctttttttttttttgtgcaactcacactatagtaaacatataaaacatccttctaaggtattgtgagatcttcctgcctctggaagcacagagggagatgtgctattgcttccatttttatgaatgagacagccagagggaagcgcttggaggagcgggccacggccatgctgggaaaggctggaggcctctgaccctcagcttgtggtttatttccctgcctcagccaccgcctccatcttgcagctggctccccttcccatgcttgaggatgtcaggccatttggattcttattggctggtctttcagattttagttggggatccagtgaaagtgacccacaacagagttttgaagccatccagaatctcaaataatccaaagttgcatctattttcttaaaattaactgaatgatgaatgttgacttacatgttcttttcatatttggggtgggggaggggttgggagcaggaagaagacagaagcagcactgtttaaagcagaagtcggccaggcacagtggctcatgcctgtcttaatcccagcggtttgagaggctgaggcaggaggatcacttgaggccaggagtttgagaccagcctgggcaacatggcaaaatttcgtctccactaaaaatacaaaaataggccagatgtgaggacacgctcctgtagttccagatacttgggaggctgaggcagaaggatccctgagcccaggagttggaggctgcagtgagctatgattgcgccactgcactccagcctgggcaagacagcaagatgctgtctctaaaaaagtgaataatctaggtcagcactgtgtctgccttccagtgtcagcactctgtctaaggaacattctgagttcagtccctaaggtttgtgcccagtgccctagagctgccctataaatgtctgggtggatctctaccctgtatttctccaagagaagaaaacaatcctagccatatccccggcacttgtgaggcgtgtgtccctttgacttttcctgcctttccctctcactgtaccatccacaagcaaagcctgtttccacggggccaaaagctgtaacaatattaagatgttttcctcaaccttgtccccagaaagatactctgtttccagaagattgttctcccttgggcattacatcatgaattgattcagttcttggaggaagaaattggacaaaatataatagatgacctcttggggagacatacttaggttgttaagtattcccatcagaaaactaagaaactgcttatatattactactctgtccacatttaaactttcaccttcttgcagctgagcagggtgcttttttctgtaagggtttttgttttactgggggtcaaagagaacatttctcctttatttttttaaggaatacaagtattctttgttttttgccattaccctcccttggtttcaggagccggggcaggacaccagaccctggggcaggttgggacgcagcagccgcaaaagggtgtcccctgacccccagatgagtagggagaagggaaaggggctactggggcatcatggccatcaggaaaggggcaacacttgtcaaatgtttggaagggatcactaaggtcttgcagatagcatggctccatatgcagcatccatgctggagaagaggctcgagttcgtctttcttgggaactggttctcagggaaagatgttaatgactgatgaaataactcccatcaaataaacagtgcagtaagaaatgtgggagctgtttgcttttccaagttcacaagctggagtggagaagagacccaggagaactggctgtttgcgtctgctggcggcagatagtggtcacttggagggaagagctgagaagcaggagggactaagcaatgaaagtgacgaacctttcatcgctaaatgcccatctagtgactggcagcttgccggtgtccagcgcctggctaacagattgaagggccggggggcgagttggctgtctcctttggcaggatcgttgaattggtagggccgatttccttcgtggaggcaggagcattctcacaatgtcagccagtctcagcgttgtcttgtcttataaatctccaatgggaatattagcacagctccccagctcactgaaatctattcctctgtcctaataaaagccctgcagtggctccaaccaggcccctgagtcagcctccgggaggccagctccttttctgaggtgtgcaggtgaggaaatggaaagcccctcttggactctagtcaggggagatgcaacgattgaggaaattggatgaagggtacacggggcctctgctgtttttgcaacttcctgtgaatccatcattatttcaaaatcagttttaaaaagtaatgtgcttaaaaccacaaaagtgtgagcctcagttacttcatctgtaaaatgggaatattagtaatgcctcctttatgggacctctatgaaaataacacagatattctgtatttgttttcatcagaccagcatcctatgccttgctcacctattcccttgatcacagggtacctattcccttgatcacagggtaaccaaaagatgaaaaatattccattgtattgttcatccgcagtgtcgtcactgcagcaggtgttcttccacatgccctcattttatgtgacttcattatcacacccacattactgataaggagctgagacttgtttttttaagagacagggtctcactctgttccccaggctggagtgcagtggcaggatcatagctcactgtagccttaaactcctggactcaaatgttcctcctacctcagcctctcaggtaactaggactacaggcatgtgccaccatacccagctagcttttttaaatttttggtagagatgggggtcttgctatgttgcccaggctgatctcaaactgctgccctctaacaattctcctgcctcagccttccaaaatgggactaaaggcattagtcactatacccagctggaagctgagacttttaagaggtcatgtgacctgcccaaagtctcagagctggtcagtggctgagctggaattaggagtctctcttcccctcaagttgattcttctttgatgaaaatgctgtacctggagaggcaatgatttggaggctgtgaaagaggagaatcgagtctcatccagaaagataagagttctgtgcaagacctgccaatgtcctcagaaatggagagccgccctcactacgtgattggagatacaatgaccatgtcttggctccactggagggatgtgtttccccttccagtcttactctcctgtccgtaagccatagcctcatcctgcatttcttccaaaggaatccatcccattagtacacacatgtcaactactgcagagcccactgcattccttactcctaatttagatttgtcttgatcacattgtgaggaggttatatggatctagcaaggtcattttttgtgtcatcctctattgaatacactacttttggctaaaaatttaaatcagcctatccatagccttgttctagcttgtccctagccatggaaatcaaataccatccatgtatcttttcaccatgttaccaaaacatcaggggttgagtctaggtcctactactcactgcactaaaagccagtcactgagatgattgttgccaaggaagaaggctttaatcgggtgctacagagaaggagatgggagctcagtctcaaatccatctccctgaccagctaaaactaagggtttatatagctgggaagaaatgaaacaatatgtaagaaaacaggaactagggaaaggcaaggaaaaaatcaggatgaatgaggggtccagcatctcattgtgtagatgtggtgatctgatgagtttcacttctttgatccttttttgagaaacctgaaggtcacttcctaaggaaggaactcggataaaacaaacacatgttttaagctttgagaccagaagggttggccgggctcagtggctcacacctgtaatgccagcactttgggaagctgaggtgggtggatctcctgacatcaggagttcgagaccagcctggccaacatggtgaaaccccgtctctactaaaagtacaaaaattagctgggcgtggtggcacacacctgtaatcccaggtgctcaggaagctgaggcaggagaatctcgtgaactcaggaggaggaggttgcagtgagctgagattgtgccactgctgcagcctgggtgacagagtgagattccatctcaaaaaataagaccagaagggtcaatttctatgtttagtctatgggactattaaatcagtttcacacccaaagtgtgtctacctatggcttggcaggagaggtcaggtgtgtgtgtcagcaaatgacaggaagattgccaggaagttctctctagagtctggtaaaagaacagcttctgtcaggaagtcttaccctgttcttaggacagttgtagggataatctgagtttaacagccctccctccatcctgggcaccttaattccaggaagagacaggtctgtactctgggcagctgttggcatttctgttgggaggtctggaggggaaactggcacaggtcctgtgttgggggcttaggacagcaagtgccaaaagaaatctttattaagtgataactaattaccagatggtgagtagaatgtaattgtagttggtacgctgaagttgtgagacttgttaagagatttctccagctccttgctctagttctacaaagaaattttggggagagaatgggaatcccctcctgtaggagttaatttccaaacctggggaaagctaccctcctttccccaatagcttttccaaagaatcaatgatttaaaaactgtatcttggctgagcatggtggttcacacctgtaatcccaacactttgggaggccaagtcaggagtatcacttgagcctaggagctcaagaccagcttggacaacatagtgagaccctatctctatgaaaaaaatacaaaaattagctgggcatggtggcacgcaccagtagctattctggaggctgaggtgggaagatggcttgagcctggcagttcaaggctgcagtgagctgactgcaccactacactccaacctgggcaacagagaagaccttgccaattaatcagtcaatataaaaataaatcaatggccgggcacggtggctcacgcctgtaatcccagcactttgggaggctgaggcaggcggatcacaaggtcaagtgatcgagaccatcctggcttacacagtgaaaccccatctctaccaaaaatacaaaaaaattagctgggcgtagtggcgggcacctgtagtcccagctacttggaaggctgaggcagcagaatggcgtgagtccgggaggcggaacttgcagtgagccgagatgcgccactgcactccagcctgggtgacagagcgagactccgtctctaaataaataaataaatgaataggccgggcacggtggctcatgcctgtaaccccagcactttggaggccgaggcgggcggatcacgaggtcaggagattgagaccatcgtgtctaacacggtgaaaccccatctctactaaaaatacaaaaaattagctgggtgtggtggtgggtgcctgtagtcccagctactcgggaggctgacgcaggagaatggcgtgaacccagggggtggagcttgcagtgagctgagatcacgccactgcactccagcctgggtgacagagcaagactccatctcaaaataaataaataaattaattaattaattaattaaatgtaaacatataaaagaaatgaataaaaaacttttatttcagttataccccatttcacttgcaaatgttcctgtgacagtaaaacatcaaattataaaatttcaagatatcttgttttgtacttgtagttgggatttgcagtacttgaccattatataacattacaaaatgatctgatggctggcaagatggccgaataggaacagctccagtctgcagctccgagcgagatcaatgcagaaggtgggtgatttctgcatttccagctgaggttcatctcactgggactggttagacagtgggtgcagcccatggaggatgagccgaagcagggtatggcgttgcctcacccaggaagtgcaaggggttgtggacctccttcccctagccaaaggaagcagtgagggactgtgccatgaggaacggtgcactcaggcccagatactatgcttttcccatggtctttgcaacccacagaccaggagattccctcgggtgcctataccaccagggccctgtgtttcaagcacaaaactgggtagccatttgggcagacaccgagctagctgcaggagtttttttttttttttttttttgtatcccagtagtgcctggaatgccagcgagatagaaccattcactcccctggaaagagcgctgaagccaggcagccaagtggtcttgctcagcggaccccacccctacagagcccagcaagctaagatccactggcttgaaattctcactgccagcacagcagtccgaagtcaacccgggatgctgtagcttggtggggggatggacgtccaccattactgaggattgaataggtggttttcccctcacagtttaaacaaagctgcctcaaagttcaaactgggtggagcccaccccagtgctgcaaagccactgtagccagactgcctctgtagattcctcctctctgggcagggcatctctgagagaaaggcagcagccccatcaggggcttataaataaaactcccatctccctgggacagagcacttgggggaacaggtggctgtgggtgcagcttcagcagacttaaatgttcctgcctgccagctctgaagagagcagcagatctcccagcatggcactcaagctctgctaagggacagactgccttctcaagtgggtccctgacccccattcatcctgactgggagacacctcccagcaggcgtcgacaggcacttcatagaggagcactccaggtggcatctggcaggtggccctctgggaccaagtttccagaggaaggaacaggcagcaatctttgctgttctgcaacttctgctggtgatacccaggcaaagagggtctggagtggatatcaagcaaactccagcagacctgcagcagaggggcctgactgttagaaggaaaaccaacaaacagaaaggaatagcatcaacatcaacaaaaaagaacatccactcaaaaaccccgtctgaaggtcagcaacataaaagaccaaaagtagataaatccacgacaatgaggaaaaaccagcgcaaaaaggctgaaaattccaaaaaccagaatgcctctctcctccaaagaattacagctcctctacaacaagggaacaaaattggacggagaatgagtttgacaaattgagagaagtaggcttcagaaggtggctaataacaaactcctccaaactaaagaagcatgttctaacccaatgcaaggaagctaaggaccttgaaaaaggttagaggaattgctaactagaatagctagtttagagaggaacataaatgacctgatggagatgaaaaacacagcacgagaacttcgcaaagcatacacaagtatcaatagccaaatcgatcaagtggaagaaaggatatcagagattaaagatcaacttaatgaaataaagcatgaagacaagattagagaaaaaagaatgaaagggaatgagaaaagcctccaagaaatatgggactatgtgaaaagaccaaacctatgtttgattgtacctgaaagtgacggggagaatggaaccaagttggaaaacactctgcaggatgttatacaggaaaacttccccagcctagcaagacaggccaacattcaaattcaggaaacacagagaacaccacaaagatactcctcgagaagagcaatcccaagacacataaacgtcagattcaccaaggtcaaaatgaaggaaaaaatgttaagggcagccagagagaaaggtcgggttacccacaaagggaagcccatcagactaaaagcggatctccctgcagaaaccctgcaagccagaagagattgggggccaatattcaacattcataaagaaaagaattttcaacccagaatttcatatccagccaaactaagcttcataagtgaagcagaaataaaatcctttacagacaagcaaatgctgagagattttgtcaccaccaggcctgccttacaagagctcctgaaggaagcactaaatatggaaaagaaaaactggtaccaaccactgcaaaaacataccaaattgtacagtccatcaatactatgaagaaaccgcattaactaatgagcaaaataaccaagtagcatgataatgaccagatcaaattcacacataacaatattaaccttaaatgtaaacaggctaaatgccccaattaaaagacacagaccgggaaattggataaagagtcaagacccatcagtgtgctgtattcaggagacccatctcatgtgaaaagacacacataggctcaaaataaagggatggaggaatatttaccaaggaaatggaaagcaaaaaataaaaaaaaagcaggggttgcaatcctagtctctgataaaagagactttaaaccaacaaagataaaaaaagacaaagaagggcattacatagtggtaaagggatcaatgcaacaggaagagctaactatcctaaatatatatgcacccaatataggagcacccagattcataagcaaattcttaagagacctacaaagaaacttagactcccacacaataatagcgggagactttaacaccccactgtcaatattagacagatcaatgagacagaaaattaacaaggctattcaggacttgaactcagctctggaccaagcagacctaatagacatctacagaactctccaccccccaaaaacagaatatacattcttctcatcatcacctcacacttattctaaaattgaccacataatttgaagtaaaacactcctcagcaaatgcaaaagaatggaaattgtaacaaacagtctctcagaccacagtgcaatcaaattagaactcaggattaagaaacttactcaaaactgtacaactacatggaaaccgaacaacctgctcctgaatgactactgggtaaataatgaaattaaggcagaagtagcactaaattcccacaggagaaggcaggaaagatctaaaatcgacaccctaacatcacaattgaaagaactagagaaggaggccaggtgcagtggctcacacctgtaatcccagcactttgggaggctgaggcaggcggatcatgaggtcaggagactgagaccatcctggctaacatggtgaaaccccatctcaactaaaaatacaaaaaattagctgagtgtggtggcgggtgcctgtagtcccagctactcaggaggctgaggcaggagaatagtgagaacctgggaggcggagcttgcagtgaaccgagaccacaccactgcactccagcctgggcaaaagagcaagacactatctcaaaaaaaaaaaaaaaaaaaaaaaaaaaaaaagaactagagaagcaagagcaaacaaattcaaaagctagcagaagacaagaaataacttagagcagaactgaaggagatagagaccaaaaaacaccttcaaaaaaatctatgaatccaggagctggttttttgaaaagattaacaaaatagaccgctagccagactaatgaggaagaaaagagagaagaatcaaatagacacaataaaaaatgataaagggagtattaccactgatcccacagaaatacaaactaccatcagagaatactataaacacctctactcaaataaactagaaaatctagaagaaatggataaattcctgtacatatacaaccttccaagaccaaaccaggaagaagtcaaatcactgaatagaccaataacaagttctgaaattgaagcagtaattaatagcctgccaaccaaaaaaaaaaaagcccagaactagacaaattcccagccgaattctaccagaggtacaaagaggagctggtaccattccttctgaaactgttccaaacaatagaaaaagagagactccttcccaactcattttatgaggccagcatcatcctgataccaaaacctggcagagacacaacaacaaaagaatttcaggcagccaggtgcgatggctcacacctgcaatcccagcactttgggaggctgaggccggaggattacaaggtcagtagatcaagaccaacctggctaacacagtgaaaccctatctctactaaaaatacaaaaaagtagctggacgtggtggcgtgcacctgtagtcccagctactcaggaggctgaggcaggagaatggagtgaacccgggaggcagagcttacagtgggccgagatcgtgccactgcactccagcctgggcgacagagcaagactccatctcaagaaaaaaaaaaaaaaaagaatttcaggccagtattcctgatgaacaccgatgcgaaaatcctcaataaaatactggcaaaccaaatccagcagcacatcaaaaagcttatccaccaaatcggcttcatccctgggatgcaaggctggttcaacatatccaaatcaataaacataatccatcacataaacagaaccaatgacaaaaatcacatgattatctcaacagatgcagaaaaggcctttgataaaatttaacaccccttcatgctaaaagctcacaataaactaggtattgatggaacatatctcaaaataataaagagctatttgtgacgaacccacagccaatatcatactgaatgggcaaaagctggaagcattccctttgaaaaccagcacaagacaaggatgccctctctcaccactcctattcaacatagtattggaagttctggccagggcaatcaggcaagagaaataaataaagcgtattcaaataggaagagaggaagtcaaattgtctctgtttgcagatgacatgactgtatatttaggaaaccccattgtctcaacccaaaatcttcctgagctgataagcaacttcagcaaagtctcaggatacaaaatcaatgtgcaaaaatcacaagcattcctatacaccaataatagagagccaaatcatgagtgaactcccatttacaatttttacaaagagaataaaatacctaggagtacaacttacaagggatgtgaaggacctcttcaaggagaactacaaaccactgctcaaggaaataagagaggacacaaacaaatggaaaaacattccatgctcatggataggaagaatcaatatcgtgaaaatggcaatactgcccaaagtaattcatagatagattcaatgctatccccatcaagctaccattgactttcttcacagaattagaaaaaactactttaaatttcatatggaaccaaaaaacagccctcatagccaacacaatcctaagcaaaaagaacaaagctggacgcatcatgctacctgacttcaaactatactacaaggctacagtaaccaaaacagcaggtaacatacagtaaccaaaacagatatacagaccaatagaacagaacagaggcctcagaaataacaccactcatctacaaccagctgatctttgacaaacctgataaaaacaagcaatagggaaaggattccctatttaataaatggtgttgggaaaactggctagccatatgcagaaaactgaaactggaccccttccttacaccttatacaaaaattaactcaagatgtattaaatacttaaatgtaagacctaaaaccataaaaaccctagaagaaaacctaggctataccattcaggacgtaggcatgggcaaagacttcatgagtaaaacaccaaaagcaatgtcaacaaaagccaaaattgacaaatgggatctactgagcttctgcacagcaaaagaaactatcatcagagtgaacaggcaacctacagaaggggagaaaatttttgcaatctatccatctgacaaagggctaatatccaaaatctacaggaacttaaacaaatttacaagaataaacaaccacatcaaaatgtgggcaaaggatatgaacaggcacttctcaagagaagacatttatgcagccaacaaacatatgaagaaaagctcgtcatcactggtcattagagaaatgcaaatcaaaaccacagtgagataccatctcatgccagttagaatggccatcattaaaaagtcaggaaagaacagatgctggagaggatgtggagaaacaggaacacttttacacttggtgggagtgtaaattaggtcaaccgttgtggaagatagtgtggcgacccctcaaggatctagaactagaaataccatttgacccagcaatctcattactggctatacacccaaaggattataaatcattctactataaagacacatgcacatgtatgtttattgtggcactgttcacaatagcaaggacttggaaccaacccaaatgcccatcagtgatagactggataaaggaaatgtggcatatatacaccatggaatactatacagccataaaaaacgatgagttcatgtcctttgccaggacatggatgaagctggaaaccgtcattctcagcaaattaacacaagaatagaaaaccaaacaccacacgttctcactcataagtggtagttgaacaatgagaacacatggacacagggaggggaacatcacacactggggcctgtcggggggtgaggggctaggggagggatagcattaggcgaaatacctaatgtagatgacaggttgatgggtgcagcaaaccaccatggcacatgtatacctttgtaacaaaactgcatgttctgcacacataccccagaacttaaagtataataaaagttctttatagattctgtatatgagacctttgttggatgcatggtttgtgaatatttttcccattctgtaggttgtttgtttactctgttgatagtttcttttgctgtacagaagctctttagtttgattaggtcccacttgtccatttttgtaattgcttttgagggctttgtcataaattctttgccaaggctgatgtctagaatggtgttttgtaagttttcttctaggattcttatagttcgagatcttacatttaaatctttaatccatcttgagttaatttttgtataaagtgaaaagtagggttccagtttcattcttctgcctatggctggccagctatcccagcaccatttattgagtaggaagtcctttctccattgcttatttttgtcaactttgttgaagatcagatggccataggcatgcagctttatttcggggttctctactctgttccagtggtctatgtgtctgtttttgtaccagtaccatgctttttgggttactgtaacatatatagtatagattgaagttgggtaatttgatgtctcccactttattctttttgcttaggattgctttgactatttgggctcttttttggttccatgtgaattttagaatagccttttctagttctgtgaaaaataacaatggtagtttaataggaataatgttgaatctgtagattgtttttggtagtatggccactttaatgatattgattcttttaattcctaagcatggaatttttccatttgtacgtgtcatctatgatttctttcagcagtgttttttctccttgtagagatctttcacctacttggttagatgtgttcatacagactctattttgtgtgtgcggctgttggaaatgggattctgttcttgatttgcctctgagtttgaccattatttggtgtgtagaaatgccactgattttacttcagtaaaatcttcagtagaaacttcagtaaagttgtttatcagttccaagagccttttggtggagtctttaagtttttctaggtatagaatcatatcatcagtgaggagagatagtgtgacctcttcttttcctatttggatgtgttttatttctttctcttgcctgattcctctggctgggacttcctgcttaatccttttgaaatagtaaccaatggaacttctgtgagttgagagtgtgggatcttaggttagacctaagtgtaaatctcagtgcctcagttactgtggtgtttgctaatttatttaacttccctgagcctcaattgtcacatctgtaaaatgaggatagtcgtagtatttttctcttacagttattgtaggtgttgaattatgtggtgataatgtatgtaaagttccttgtttggtatttggtacgtgacgggaatgcaataaggttacattaattttttaccttttagtctgacataattttatccttcaagaaaagttacaggaatagtacaaaaagattccccaaatattagcattttactttatttgctttctctctttctctccatatatctagctagatatatggatttttctgagcaatttaagtaaagttgtaggcatgatccctctttacccctaaatatttcaggctgggcatggtgggtcaagcctgtaatcccagcattttgggacattgaggcaagcaaatcacttgaggtcaggagttcaagaccagcctgggcaacatggtgaaaccccatctctactaaaactacaaaaattagccacacatggttgcacatgcctgtaatctcagctacttgctgaggcagaagaatcacttgaacccagaggcagaggttgcagtgagctgagatcccatcactgtactccagcctgggcaacacagtgagtctcaaaacaaaacaaaaaaacttcagtgtatatttcctaaaaataagagatgacctacttaaactgattacttatttaaggtattgtaattattgcagttattacagtgaaagtacttgaagcagttccacagtgtttctctaactcaaattcacattacgatcaaagttaagtttactgaatgcatattatgtgcccggcatagtgctagatgctctgaaaaatattctgttgacttttctcaacagcccagtgaagcagcagattagtaactccactttgcagaacataacaactaagactcaaggaagttagtaaattgcccaaaggacttcagtgaagtggtgaactgggatttgaacccaattcactctagtaaaaatggtgccctttcttgcctaatagattgacagccacattctgctataaaaatgagaaaactggccaggcgcggtggcttatgccgtaatcccagcactttgggaggccgaggtgggcggatcacctgaggtcaggagttcgagaccagcctggcctacatggagtagccccgtctgtactaaaaatacaaaaattagccgggagtggtggcgggtgcctgtaatcccagctactcaggaggcttgaggcaggagaatcgcttgaacctgggcagcagagattgcagcgagctgagattgcgccactgcactccagccttggcgacagagcaagactccatctcaattaaaaaaagagagagagagagagaaaactacttaaggaaaacaagaatcagctctactgaggcccctgagtcagtgtgtgctcattgccactaaactgtcacgtacttctgtggcctgagcggcaggggtttggttttcacggttctttctaattctgaagcgctcttcagaacttcatttcaaaacaattgtaatccttttgcacattttgctgctggctgggaaccaagccttttgtcttcagatacctttagtcaggtttatttttaaaacgaaggtttattttcccaggaaatgctgaggatattgttaacagcttgggtggttaaactttgctttagaaccagggcatgtcatctgttttcaagcgtctggctctgctccgagattctaggagcaactgagagatgtcagcttgttttctcatgtcccagctaaatgtagcctggctccattgtcttctgcctaagcaaagagaacaacaaacacaacataatgtgttggggtgaaagatcctttcctagatatttttatgtctatcccttcctagatatatttatatctatataaaaaaatcctagagatttttagtactgaagaattctagcagatcccttttagaaccagcattaattctacttaaataaaatcctgtgcttgaatcagtggccttggctatcagttgcattaaaattcaatgggaaaataatctcaattcacagatgatgcacttcaatagttaaagaactacggccaggtgtggtggctcacgcctgtaatccagcactttgggaggccaaggcggctggataatttgtggacaggagttcgaggccagcctggccaatatggtgaaaccccatctctactaaaaaaatagaaaaattcgccgtgcgtggtggcatgcacctgtagtcacagctactcgggaggctgaggcaggagaatcacttgaacccaggaggcagaggttgcagtgagccaagctggtgccactgcactccagcctgggcgacagagcaagactctgtcaaaaaaaaaaaaaaaaaaaacaagaactacaagtaacttagaagccaccagttaggattgtttggccaaattgagagagcacctgggaatatttggggcctctgcctatggagcctggaaatggggaaacagttctctatagaggttcagcacttgggatctggggtcagactgattcgaatcccagctccaccacttaactgtgtgacctgagcaagataatttaaaattcattgtctgaaataacaacagcacctacctttcaaggttttattgtgagacttaaataatgtaagttaagcacctaggatagaccctgacccttaggagattctcatgaaaagtggctaattataataaacacaaatttgaattgggcaaaaaaactgatatttttttctcttcttcttttccttcttcgctgctttttctctcccttcctgaccgttccccactcttcccaccatcctccttccctccccctccctcagtcccattctgcatgatccagagtaagaggttagttattaaggaacatccggttcttggcattctatgtagaaaaaaaaaacccaatggtgttgaggactctgaagagaatcactgatttcataaaggcttaatgaaagtcaacaatcaaacgaaagcttttcccccctgaatcattacattctgttgttcccgaacatctgggcagagccagggacggcctttgcttggccctgctcacaacacagcttcttgagctgcagctctgtctgtgtttctgcctcatttggaacataagccatcagtccaggattctctttctggagctgccactaactacgtgggtgagttatttcccaactttgaacttgagttttcaaaatggagcaagtcagatgagacttgctataattgatgaaagtcgataaaaataccactcagatttaatgcttcatcgtatactcttctgtgtttcctgcatattcatctcgtcttgacagcaagctcttcaggcagggggaccagtcacacaccataggagagagcttaagatttagaagtagaggcctgaattgaagccctagtgctgctacctgctagcccaggtaacctttagctagtcacggaacctctgccttctgccgcttcctccactgtaaaatggagctgatgtacctgagacacgagaggttctctaaataagataatcattaaataattgataagataataattaatacaatacttggtaggcctaaaacagatgttcattattgtcatttttatcgtccacgcagcttactaccatgcagtgtgcataaatttttgttgaaacccacctgttttaagaacaaagctaagacttttgttattattgatttaaaaatcactaaagaaaaataatgttggtatataattaaaactgatttcatatccaatgcaaaacttttaaacacaaaaaatatgctctcaaaaccagtaaaggcttttagtgatgttttgtaaataatatttaggttaatactctccaggtgctctcagatttatgcagtaacaataaatatcaaaattaaacctgaaatgaaatatgaatgtttgcagtgggattaattctgtcagattttctttgcatagtacatggttcttcttaaatttgtgtaggtaatttttaaaaattattttctttttcttttcttgagacagggtttcactctgtcacccaggctggagtgcagtggtgcgatcatggctcacagcagccttgacctcccgggctcaagcaatcctcccacctcagcctcccaagtacctgggaccacaggcatgtgccaccatacctggctattttgtttgttttttgtagagactgggtcttgttatgttgcccaggctggtctcaaactcccaggctcaagcaatccttcacctcagctttccaaagtgctagggttactggtggagctactgtgcccagcctaaaaatgattttctaattatagaaataaagtcggtagtaagtgggtaaatgcaaaactagttgtgggaaagtcacaaatatttccatatgcctctgattttccacttacaaaacaattattagaaaactgccttgaatatataaaatatgctgttattataagcaaataaaatgaacatggaacacaagtgcatgtcatggattccagagaaacagaaacaacaggagatatgaacatatgaagagatttattataaggaattagcttacatgattacggacactgagaatttccaacatctgtagttggcaagtggaaacccataagagctgatggtgcacgttccaaagtgagtctgaagggaggagaagattgatgtcccagcttgaagatgttgaggtggagagaccccttcttacccaggctttttcttctattcaggccttcaactggattgaatgagggcaacctgctttcctccgcctacccatttacatgttaatcacatcgaaaaacaccttcacagacactcccagaataatgtttaaccaaacatctgggcactctggggcttactgaagttaacacataaaattaacccctgacgcactagtgtagaatatatgggaaatgcaggaaagaagtcaaaactcccccaattctgctacccacagataaccattattaagagttggcacattttctttcttgtttctttttttagatgtgtcacagatcaatgtttgtttttttgttttttgttttttttttttttttgagacggagtctcgttctgttgcccaggctggggtgcattcacagatcaatattttaattacccattctgtttgactagagatttcatgttgtttcttatttacttgggaaagtcatgaagatttctattatgcctctgattttccacttatgaaacaattattagaaaacctgccttgaatatatataaaagacacgttattatgaccaaataaaatgaacacggcccacgattctgtctctcctcaaggagaaagaaatgtttttctttcatttcataaatatggcaaccacgtttagaaggtggtgaggagggtgggtgttcgtaattcctgaaagacaccaggaaattctgtctgcccctcaaagctgatgcccactttggggaaacatccccagatggccaacctgttgctcttcccccaacccagcactgaaggtgttaatcccccatctcaccttctctgtgtcccaaggctggagatgtgagtgactagggaaacccccagtaaattaaaggtggtagtctctctgaggagggagaggtagcttgttcagctttataagccttttagctagcatcctttatcactgattgatttattggatatttatgcagcaggcagggggatttgaaatataacataggcgcttcctgagatgtcagtactctaatgttagtggtctgaacaaggatgtaattcatatctgcaggtgcttactctagtatcaaatacttcaataacatcatgcctgtggaatccgctgttcccaagggccctatgtgtattctgatatgcccgtgtcttttcctatgtgtgttttcctttcttaaggagcgctcatttccttcaataggatatgttttatttcatcccttttcctgcatttactcatattaatgtcaccgcgttcactggtaatagctgggcctggatctaacccgcatagccacgtaaatactagcctgaaacagaaagcctggagtgcattattaagaaataatggaatggagcagggtagaagttagggagttctaactcagtgtagcccagtaagaggagataggaggcaaattgtcccaagcacatggtagcctctccccagagctggcagggttgggagacaggagggaaaatttaggagtttggatacttcatttccagcaagggagttcttcgttgattgatagaagcatagcacagtcaaaacatccttttgagttttgtgtttcttttcttcctctgtcgtagcacagtcactgaccataccaactggccaaagcaggcttctacatttatgaataaatgttaaaactccagggtctgcagggctgggcgatggagatgacatgctgtcttctgggcaaggtttgctccccttttctctcttctggttcttatttatttatctggaagattggtttgtgctggcgagacagtgttgcttagcagaagaaaactctgtcctgggcctctggagagtttgttttgtttcatttgctctctaagccccacatttttcatctgtaaaatggagctagcaatctgcctgctatttatgtcacaagaaagtatagagataaaacattttttggactgttacgggatacagtatattacaagcacattaaaggacataagggtcgtgttcaaagttagtcacttagaacacaaaatggagcctgtaatgccagctattagggaggctgaggcacgagaatcgcttgaacctgggaatcagaggttgcagtgagccgagattgcatcactgcactccatcctgggcgacagagtgagactgtctcaaaataataataataataataaaatgaaagaacacaaaatggatgttccccagaaactatttacaatgtggaatgcagataattactacatatctctagtattaatatgtgtataggttcaaggatgctttcattcaaatggtgtaggttcacttgtagctgttaaattcctattttatctgctgttataaatgttgtgtagggggaccctcatcttactattaagagcaacgactttggggtgatgtcttaggagaacagggacataggctaggcagccattcataggcatggagtgttaatatttcaactgtttataagtcagggataaccattcatagtgtgctatattgtagattatgtataatatatgtttatcatattatattatctatgtgtgtgtgtgagagtgtgcgcgtgtgtatcatataatacgatacaggctgtgatccctcgggattgctgtgggggggcagtttcccatcttagactgctggtttagaaatatttcctttttgcacgcgctgctgcagtgtaagttgggaaaagacaagtatagacactgtgaacttgagccctggcaaagaattagtcttgggatcttagaaactttgatgaaaaaaataatttaaaaggtggagtcttgaaagaacttcaggacaaatatttcttgattgtgggaagaccagctcagtggaaacttggttttgcatatgtaatctaacaatccttttcttcttggaaaggatagttttcaaacaaactagaggttctaagaagataagctgttctttcttctttgtaggcaaagttgtatctccagagattattttttttattagggaaaattttttccttatatatggatttagatagtcctcttgccaaaactgatagtggttcttgataaagccattcctcagtccacaaatggggcaagcccagatcacactgatggcggggggatcctgagatgacccagactgggcactcaacactcaaccttcgaagccccacaggaatgttattccaggtgtagggatgcagcccatcagcagtgtactgggagtggattacctggctcctacaggcagggggagattagagtgaaacacctggccaggcacagtggctcacacctgtaatcccagcactttgggaggccaaggctagcagatcactgaaggtcaggagttcgagagcatcctggtcaacatggtgaaaccctatctctactaaaaatacaaaaattagccgggcatggtggcgggtacctgtaatcccagctactcgggaggctgaggcaggagaattgcttgaacccaggagggagaggttgcagtgagccaagatcacaccactgcactccagccaaaaataaaaataaaaaataaaaagaaactaaaaatagagtgagacacttgtgtgggagagttttccctaagggtgaaaattcctatgatcaatcacccagcaaggggacagatccacgggtaaaaaaggaagatgtgaatggtactggggggcaaaggagatggggtatcgaggacatgagtctccacgggaaggagggatgccagaggtccctttagctccacaggtgggagaggagatggccggcccagttcaacagactgtgagcccggctggctgctgggcgtgtagcgatcactgaggacaggtcagcctggggatttggagcgcagctacctgcagtacctgttctaactccgtctgtgtcggagcgcccttctgttatcctcagtgcattagcatggctatttttttttttttttgagacggagtctcgctcttccgaccaggccggactgcagtggcgctatctcggctcactgcaagctccgcctcccgggttcatgccattctcctgcctcagcctcctgagtagctgggattacaggcgcccgccaccgcacccggctaattgtttgtatttttagtagagacggggtttcatcgtgttaaccaagatggtttcgatctcctgacctagtgatccgcccgcctcggcctcccaaagtgctgggattacaggcgtgagctgccgcgcccagccaagcatggctttgatgacagtcaccacctggtcttagctgagctggaggcttaaaagactctatccacactgaagatgaagtatcgcaggggaaagcaacctttctgtccttactcctctactttcaataccatcatggagatggcagcttctgttctagggaggacagtggtgccagagctcctggaggtcaccaacatttaagagagtggcagcctaagtaggggctaagcagaagtgagacctggtgtgtacctgaggtttgtaccaacactggagctgatgtgtcccacgtcactcagctgtgctctagggaaggacgcccatcatctagccaccctctccaccctgccactatgtcagtgaggctaccaaagccagggatgtttgggtcatctttgttgctctgctcacagcctgcaaaggggctccatttgtccccaatccagaggtcaagactcctgagcatggctcacagggccgagcataacatgttcctgcctacctctctccccaaactagcatttgcacatatcttttacctgacacaggatgttgattgtacctggaacatggcaggctcttgcaccccaagttgcttgcacttcatccttactaatcttttttttcaattcctggctgcaatctcttttgtcacctggccatgggacactgttccttccttcaggaccactgctgtgctgtctgcttcctgctgccacaccctgcccctgccggcagccagcctctaagttgtccatcaggtcttgcattagatgccacgtaccccaggaagctgtctctgatgctgtctttcccccggcaatgcagcctgaggtccttcctatccaaacctccttcccctcttcactcttttcacagatgtcagaagcctctccctgcctcctcctgctccctgtctcttttacccttcatggtatttcttggataaatctcggaaactgctaattttatcaaggcgtctgcctcctggagcaccagaactgatctagttcttttccacgaggccttgccgcgttaatgaaaacatttcccccagactcgattctccctttcaacctgtccctttcctccatggccatctctctctttgccgtatcagtgcaagtccaccaactcttctgcaaaaatatagagttgctttgcacttgtcacatgcccttgtaagggtattccatagtaaaggtgacaaatatgtatgtgtttgggtgtggtatacacggtgaggttagtgtgcctgtgttgtccaggaggaaactgaggtttgggaggtttaaaaccttttattaatttatcaattttttgtttcatttttgtgcgtgtgtgttttttcaagacagggtctcactctgtcacccctggcgtgcagtggcacaatctcggctcactgcaacctctgtctcctgggttcaagtgattctcctgcctcagccccccaagtagctgggacttcaggtgcacaccaccacacctggctaatttttgtatttttagtggagacagggttttgccattttgtccaggctggttttgagctcctgacctcaagtgatctgcctgcctcagcctcccaaagtgctggaatttcagacgtgagccactgtgactggcctgatttatcagtttttttttttttttttgaaacagagtcttgctctgttgcccaggctggagtgcagtggcgcaatctcaactcattgcaagctccgcctcctgggttcacgccattctcctgcctcaacctcccaagtagctgggactacaggtgcccgccaccacgcccagctaattttttgtatttttttttagtagagacgaggtttcactgttttggccaggatggtctcgatctcctgacctcgtgatccacccgcctcggcctcccaacgtgctgggattataggcatgagccaccgcacccggccgatttatcagctgttttagagatagggtctcactgtgttgcccaggctggagtgcagtgatgcgatcacagctccctggatcctcaaactcctgggctcaagcaatcctcccccatcagcctcccaagtagctgggactacacacacaggccaccatgcttgacttggcttgggaagtttcataattcgaggctgcaacagaactgtttagaactcaagtctgttcttactacactatgttttcctccaagacactttccatttaaaagttaaataataatttgactagcaaatattaaggactacgatatgacaggaattatgataagcactggggatataaaaattagtccttctggctgggtgctgtggtcacgcccaggtcagcattttgggagacctaggagggcagatcacctgaggtcagaagttcgagaccagcctggctaacatggtgaaaccccatttccactaaaaatacaaaaaattagctgagcttgatggctcatgcctgtaatcccagctactcaggaggctgaggcaggagaattgctagaacccgggagacagaggttgcaatgagctgagatcatgccactgcactccagcttgggcaacaagagcaaaactccatcttaaaaaaaaaaaaagaaaaaaaattagtccttctgattcactgaggatgttgtagtctttctcttcaataaggtgatgatcaagtgggatcatgtgaataaatcgtaaaatgtgtggtgccaacagtcaacgcctagagggaggacgtggacaagctagggcttttaagagactaaggaggccgggcgcggtggctcacgcctgtaatcccagcactttgggaggccaaggtgggcggatcacgaggtcaggagatggagaccatcctggctaacacggtgaaaccctgtctctactaaaaatacaaaaaaattatctgggcttggtggcaggcacctgtactcgcgaggctgaggcaggagaatggcatgaaccccagaggtggagcttgcggtgagctgagatggcaccactgcactccagcctgagcgacagagtgagactccgtctcaaaaaagaaaaaaaaaagagtctaaggaatttgttctgggtgcagtggctcatgcccataatcccaacactgtttcccccttcttctcacccactcccttcttgaagtcctggaggctgagatgggagcagcacttgagaccagcagtttgaggctttagtgagctatgatcatgccactgcattctagcctgagtaacagagcacgactcatctctcaaaacaaaaataattcagagaatttgggaagagagagaaaaatgaaaatttcagacagggggatcaactcaagaaaaaccttgacagttggaaagtagcctggtatatttgagggatctgagacagaatcagtttcattagggttcccttttgaagtaatgggaggtgaggttggccagataagggtatacctcaaatgcctgtaggtagtgagggaaccttcttaatcaaaggaataacagagaaagtgctgcttcagataaccaaggccaaggctgagttttgaatgctgtctgggcttagcttccaatgactgagggagttatttccctggatgaaggtatgttcttatttcaattgattcttaaagtactttttattaatatttattaaggagagttatccaactgctcatgaagtttaggcggttacactagggcaagatatgtttccctcatcttctcatctaccaccttcttgaagtcctggaaatctaaggaatggaaggaggcccttggtactatacctcaaggctacaaggaagacatacatcatccaacataatagataaagataacaggagggtaatcttcactatataaaagggtgattatgttccagatactctgcatcggatgcagagaagacttcttcctgacatcaatgccagaggcagatctaaatctaaatctaatctaaaaggtggtgggaccttgggacaggcttcagactggggacaggaggtaggggttaggggagagcaaaggcctaatcagattagggagtgtctagtcaattgtctgttgtaacaaaatatcataagctgggtaatttataaagaaaagaagtttatttagcctgtgattctagaggctgggaagtccaagagcatggtgctggcatctggtgagagtcctcccatggcagaaggcagaagcaagcacatgagacagagcaggagcacaagggcagacttgctctataacagcccattcacaaggtaattaacctgctcccgagataatgacattcatccattcatgaaggctctgatcccaagacctcccaccaggccccacctcccaagactgctgcattgggaatcaagcctccaacacatggattctggaagaaaaacactcaaaccatagcaggggggaatgaaagagttgaaagagacagagagtgtgtctaggggaaacgctgtctggactgtgatttggtcataggatgcattttgagagttagtattgatgtattaagtcttgcacatttttttgtcagatttatccctcagtatttttgttgctattgtaagtggtattgcttttacatttcaatttctaattgttcattgctactgtttagaagtacaattgatttttgtgtattaatttttcattctgaaaccttgccaaaatcatttattaagtctagtatctttcttgtatttgttttaatagatttctcactttggttcttttaaaaatatcttctatgactctattagcttgttctaccttttctgtagcatcttgaatacatggaataccattataaaaactattaatgtccttctctactgatgctagcatctatgtcagttatgagtcagttttaatagtcttttctcctcattattggttgtatatttctactttgcatgccttataactttttattggatgccagacatttttgaattttacattactttgtgttacaccgggcgcctctgcctcctgtactcaagggatcctccctcctcaatctccctagtagctgggactacaggctcatgcctggcttatttttgtattctttgtagagacaggtttcaccatgtgggccaggctggtcttgaactcctgagctcaagccatcctcctgcctcagcctcccaaagtgtgggattacaggtgtgagccactgtgcccagctgagactgggtaatttataaaggaaggaggtttaattggctcatggttttgcatggaaggaggtttgcattggctcatgaagcatgatgctggtaattgcttgatttctggggaggcctcaggaaatttacaaacatggcagaaggtgagtcttacatggcaggagcaggagcaagaaagagagtgaggggaaaggtgctacacactttaaaatgaccagatcatgtgataactcactattatgagaacagcaccaagaggttggtgctaaatcattcatgagaactccactctcatgatttaatcatccccaccaggccccacctccaacactggggattccaattcgacacaagatttgggtgggggcacagatccaagccatatcagaagatcattatttctggccttgtgtatgctctgggtattgttccctctaatccttttgagtggctcatgtcctaagctcaggtggtttactcacacaatattcatctgaatactcaatggggaccccctgcaggtctccagagttcactctctgtgcagctctcacttctctagtactctgccccgtgaactctaactgctttggctttcccagacttccagctccatttcctgaattcagggggaggacagggatcttcctggattccccctccccatgctgaagatcagaaaccttctccaggcagtaagtttgggctaacataaggctcatctcatttgttttctatcaggcaggcatcacccactctttgttttcttgagaatcatcacttcatatatataatctggtgttttggtgttcatgtgtgatggtaaatctagtctctgttactgttaccaaaatggtagagttcagtctaggtcatgttgctcactgcacagaaatccaatcactgagacaacaagcattgctagggaagaaggctttaattgggtgctacagaggaggagatggcagatccatctcaaaccatctccttggccaactaaaatcaggggtttatatagcagggaggaaacataatacacgcaggaaaacaagaattggggaggggtaaggaaaaggagtcagtcaacaggaagcaggtggttgcttaggcagtcatgaaggacgatctagcgtctcattgtccagaggcagtgatctggtaagtttcaactctttgctactatctgggaggcctgatggtaggtttcatatgaaaggaactcagataagatcaatgtaaccttttcaaatgttaagactggaagggtcaatttctgtttgttcaagagaaaccataagcatcagttctatgggacaattgggctggtgggagtggacacccgctctctcaagggttagggctacaaaactccatccactttctactggtgacaactagttgtatggttccacttggatacaatgggggtgaggagatgttcttggctgaacagttacttctcagcaataactctgcactagaggaggggaagcatgaattttagtggccagctagctgtctctgctacagtgttcttttgtattgttttgttttgttttgagatggagtctcgctctgtccccagtctggagtgcggtggcacaatcttggctcactgcaacctctgcctcctgagttcaagagattcttctgcctcagtagctgggactacaggtgtgcaccaccacatccagctgatttttttgtatttttagtagagacggggtttcaccatattgcccaggctgttctcgaactcctgacctcaagtgatttgcctacctcggcctcccaaagtgctgggattacaggtgtgagccaccgcacccagccatgctacagtgtccttatccttatcttacagatgagcaaactggggcacagtagagtaaaaagaagctcaactgagaaaaattagcatagtgatggtcacaggcgaatgtgcatttgcagctcctacaggctttaacctcctaactcatttttctgtttaggagattctgaaagccataaaatcagttgacctcactgactgttagagccaggagtgctgattgtgaaaacagttatctcaatattccacgtggaattgcatatgcggtaagagaaagttttaaaacaaaacggagttcaatttctagggagcagagctttgttgtctttgtttgaccaaaacctcaagtaaaagaagagaatatagtgggaataattagccacaacgggtggtataaatccaaagagaaaaataattcatcaactttaaagcaactcatttaaaactgggagtgtggtttatttgacctgcatttgggagcaaatgttaatgaagaagtaaaggcaacttatggctttttcagttctttcatttccctctagatgtctttgatagaaactaattatcaatgctcttgatttaatttggaaaaaaattggatgaaggtttttcttaagtcccatgtcactgttcataacctgggagagctaaaattcacctctgatccttcatcagtaactgctctagtcagtagagtccgaggagtccactttggaaaacaagaaaaattattattatggtgattattattttttaaataaaaatttcttgtgggaatgcagaaagaccagaggaaattttcccagtgctaaagttgcttttattaacccattaagcagataaacaaaactttcattaattgaaacccaaccaaattgaacccttttttttttttttttctgcattctgttttcaaggaaagaaaaaaaaaagactcaaaagcaagaaaacggccggatgcagcggctcatgcctgtaatcccagcactttgggaggccgaggcgggcggatcacgaggtcaggagatcgagaccatcctggctaacacggtgaaaccctgtctctactaaaaatacaaaaaattagccaggtgtggtggcgggcgcctgtagtccccgctactcgggaggctgaggcaggagaatggcgtgaacccaggaggcggaacttgtagtgtgagccgaggtggcaccactgcactccagcctgggcgacagagcgagactgtgtcaaaaagaaaaaaagcaagaaaacaagatactgtcaggaacttatcataaaatgaactttcaatatgatatttaggatccattagatatgtagcccaatcatgtacacttcctacatttcgtctgcagtatttctttttttttttttttttgagacagagtgtcactctgttgcccaggctggtgtgcacaggtggaatcatgtttcactgcagcctcaacctccccaggctcaggtgatcctctcacttcagcctcccgagtagctgggattatgggtgtgtgctaccatgcccagctaaatttttttttttttttttgtagagacaaagtttcgccatgttgcccaggctcatctcaaactcctgggcttgagggatctgcccaccttggactctcaaagtgttgggattacaggtgtgagccatcacatctggccggcagtgtattcttagttattgatgttttccagggttatatcctcaattttcttaccttttttggtagtataagattgggattaagaatgtgggctttggatttgaatcctagcaccatcatttataaattttgcagcatcatctgaatgggcaaaatatcaatacctactcatagaattgtttgattaactgagttaatacatgtcaagtgccagatcaatgactgtcatggaggaaatgctcaatacatacttgctattattattcttattctacatggcatccctggatggcacttttcctccttgatattcatagcttcaactttcatttatatgctagtattgatagcatccaaacagaagtgtaaaaatatacatgtgtatttataaatatggctttgtcccatagtttatctactgggactgttttttttcattgaccttcacccttgagggacccacaatatcatttccaagtagtcagccttatatatggggttctacatcttattttattttgagacagcatcttgctctgccacccaggctgaaatgcagtggtacaatcatagctccctgcagcctcgacctcccagggtcaagtgatcctcctgccccatcctcccaagtagttgggactacaggcatgcagcatcatgcctgactatatctttaaaatttttgtagagatggggtctcactatgttgctcaggctagactcaaactcctggctgaaatgatcctgcagcctcagcctcccaaaatactgggattacaggcatgaggggttccacatatccttacattctaccactgcagaaccgtatggtgctgcccactgagacccctgtcttcagctttgatgattgctgttctcttctagtgaggttagaatctacttatcctgcagactagtcctctcctgccagtggaatccatcaaggctctgcaagactccaggcctgagtgtccctgtgctcactcaccaggaggccgctgtgacatggccctttagaaaaccccccaccaccgagtccatcatgcctccccttccctgttacctttggttattgctttctctctggttctagctctctgcttgcttttctccgactcaccttcttcactgctctctttccaagccttccacttgtcccatagtaaacagatgtctcagcatcctcaaccttttcactgaaggctcctctattaccatgcctgagctgaaactgggctggctcctctggacactgcttccccccaggagccatctcaaatgggtccttttcattttctcactccatgcatgcccgaaggtgggcagaaaatctctgctttcctccagtttttgccacaggtttctccctcctgttactgccacccactgtccgcctgaaagatgttctccatttagggaagtcactggcatggggctcaggctcctaccttccactcttaagtcctgctcatctctgtgacattatcttgctgttccccagcaacccttttcacaaacatatcctgtactttatcataacacataactgtccatccccaaaagaataagtgtagacatgccctccatcaaccagggcctcttaatgttgcagctgcctcaggggctcacgcctgtcccatgtgtttcttgaccctgtggtctattgttattgacccttaatcccttgaggctcagctcttcccctatccagtcttcaccttattttccacccaacttagactttttgattcattgtttccatatttcccttgctgatatgattgggctatgtccccacccaaatctcatcttgaatattagctcccataattcccaagtgttgtgggaaggacccggggggagataattgaatcatgggggcggtttcccccatagtgttctcgaggtagtgaacaagtctcacaagatctgatagatttataaagggtttcccctttcacttgggtttcattctgtctcgtgcctgctgccatgtaagatgtacctttcaccttccaccatgattgtgaggcctccccagccatgtggaactgaatccattaaacctctttttctttataaattaccaagtctcaggtatgtctttattttcagcatgagaatagactagcacacttgccaattaacttctttgctcacatttccttttttgttgttgttgttatatcctccctaaaatacctggattgacgtcccaaagcgctgggattataggtcagtttgtgtctgacttcaccttgcttaaacctggactactgcatttctaaagaaaatagcattatcatatagattggtagactctagattcatatttttttcagccctaacagggctgaattctctgaattaatgatttcaaacctttttcattctcctcaatggcctacaacaccctgcattgcaggccctccattgtttctctgaccccacctcctactgctgtcacagttgcccacacctgtccagcctcactggcctccctgctaaatctggaatggatctgtgatggtcagtttgtgtgacaacttgactatgctatagtctccagttattcaatcaaacactaacctaggtgttgttacgaaggtagtttttagatggaattaaaacccataatcagctgactttaagtaaggcagataatcccagataatctttctttttttttttctttttttttttttttagacagagtctctctctgttgcccaggctggagtacagtggcgtgatctcgggatctcagctcactgcaacctctgcctcctgggttcaagtgattctcatgcctcagcctcctaatcagctaggattacaggcgtgcacaccaccacgcacaaataatttttttatttttagtagagatgggttttcaccatgttggctaggctggtctggagctcctgacctcaggtgatctgcccgcctcggcctcccaaagtgctggggttacaggcatgagccaccacaccaagcccccagataatcttaacaggcctgattcagtaagttgaaaggcctaacaagcagaactgaggcttttctgcaaactagagcttcagctcatacctcagaattctagcctgcccttcctgttggcctgccttacaaatattggactttcttagcagccttcacagtcacatatgccaattccttgcaacaaatgtcttaatatatatctcccactggttctatttctctgattgaaccctaacatggatttttggacctgaaagtgaagtgctactgtaacaaatacttaaacatgtgaaagtggctttagaattgggcagttaatgagagagactggaagaactctgagaagcgtgattgaaaaagtctaaattggggccaggtacagtggctcacacctgtgatcccaacatgttaggaggctaaggtagaaggattctttcagcccaggagttcaaggctgcaatgagccatgattgcaccactacacaccagcgtgggtgacagagtgagaccctatctctaaaaaagaaaaaataaattaaaaagtctaaattgtcttacagactgttaggagaaatatggatgttaaagactctctgaggggtcagaaggaagtggggatcatacgagagaaggcctaaattgtcttagaggttacctaaattgtcagaaacagatggtttgtggaagtatggacattaaagacgttaacctactggcttggattaaagtaaaaatgaataattttttaaaaagaaaaataataattaagaaacaaaaaaaaggtgctaactgtgaagatccagaatgaaatggggactatatttttgaaaacaggaggaaaagagatccttgttatatagtggcagaaaagctgagttgagttgtgtcctacatgtatatggaaagcagaacttttaaacaatgtatttggatatttagctgaggaaatttccaagcagggtgttgaaagcatagcctggtttcttcttgctgcttatagtaaaatgtgagaggaaatagatcaatggagggaagaactgttttcgttgttgttgttgttgctgttttggtttgttttgagatggagtctcactttttcgcccaggctggagtgcaatggcacgatcttggctcaatgcaaccttcacctcctgggttgaagcaattcttctgcctcagcctcccaagtagctggaactgcaggcatgcaccaccatgcccaggtaattaagaactgttaatcaaaaaggaacaggacttcatgatttgggaaatcctcagcctatccagattgcaaaagatgctaaaatgagattcactgtcaggagagctgtgctctggaaagaaggccaagggtgtggctcgacagctttttgctagtgcctggaatggataaaaattcagaatattcagtcataaagagaactctgaagagattaggcatatgattcataggttctcttagccatctcagcagaagccaggaataatgatgaaattatcaggtgaaacctgtgaaggagtctttggtctaatggaatggatttccatgatatacatagtagacctacaaggcttttgagatttataacagcagaaacactgaattgaaagagagggctgaaacagaggactgaatgaaagaaagctgtaggactcccaggcagaacaagctgataaaacttctcagccacaaacaaatacaatcttttctgaaaaaagaaggatggcccagaaggtagaaccttgggcccagagggtggagcctctggccacagagaattattcactggccttgaaaactaatggagtttgccttgctggatttcaaaattgtttaggaccggtgctattttttccttccattttgtcctgctttgaatgggagtagctgcaactggcatcctgttccatcattgtatttgctgagcagataatttgttttctaatttcacaggtccatagatggagaggaattttgctcaaggattgatgatacccagagtcttacctatacatgagttagatgatttaaatatttaataaagtatcttataaacatgatattctttatttttttttctgtcacccaggctggagtgcagtggtgtgatcatagctcactgcagcctcaaattcctgagctcaagcttattctcctgtctcagcctcccaagtagcctgggattataggcacgtgccaccacacctggctaatttttaaaatttttttgtagagaaaaattttttaatttttttgttatgttgcccaggatgggatattctgtaaaatatataaaaataactgcaaaactaaaatgtaaaacaaacactagattaggagacaggagacctgacttctgccccactcttttaacaccttactagtgacgttgtataagtcactcaattctttctgggccaatacctgcacttggtaaatcaggactattaatagtaccctccttatatcacaatgctatatgaatcaaagtaggtcatgggtatgaccatgcttaaaattgtgttaggtattgtacaaatatatagtattatttttgctgagggttgaagtaaacaaaaataattcagttgttaagcaggaaatatcaaatggtctgagagacacagctcatatcataccttgacctcaatgttaccagccttgatttagataatgagatttgagattttttaacagataaagtttagatgaaattttggtctttgaattgatgccataatggattgagctgttgggatgaggtgaatatattttgcatattggatggttgtgaatctttaaggttcaggagatgagctgtggtagactgaagagtgattctcaaatatattcaggacctaatccctggagcctgtgaatattacctaatgtgtcaaaagggactttgtgcagatgtgattaaatgaaggacctggttttgagatagggagattatgctggattggcctgataagcactaatgtaagtgttccgaagggagatttgactatggaagaggaagtagcaggtgtgagaatggaagcaagaggttggagtggtacaaggagcggccatgagtcaagaattgcaggcagcctctccaagcggggagaggcaaggaaacagattgtcccctgcagcctccacaaaaagtccagcctggatgacacctcaactttaaccttgtgaacttttggcttccagaacttatgggagaataaatttatgttgtttccaaggacaaagttgatggtaatttgctgcgtcagcaataggaaactcacacaatatcctacacgctctcacctgaggatttttgtgctggctattccttcctcctcaaatattttcgccagatagccatctggctgactcctccaccatcttcaaatattggcttacacgtgaagcctctctttaccttgtcatttgacattgcagccttccctctacatcctccccaccagagctcttcattcccttcaccctctattcgctcaaagtactcacaaacttctagcattctatgtaattcacttacttattatattcattgtagattacttgtcttcccaccttgggatacgagctccacaatggcaggggcctttttctactttgtccattactgaattctgtgtactcaaaatagtgcttggtgcatgggggttacccagtaaatatttatcggatgaataaaacttcctatccagttgcctcactcttcatctcagcagatgattttacttccaatttcatagaaaagaaactagaaatcatcagggagggcaccattaatcttgtgtttctgcctttccactgtcttctccccattctaccttttgcttcccttcctcttccaagtgaattcctccacctgggttttggtttccactactcctacctagtcaggaaaatcaaacattaaattatcctttttcttatattctttctttttagacagggtctcgctgtgtcacccaggctggagagcagtggcacattcataactcactgcatcctggaactcctggcctcaagccatcctcctgccttggcgtcccaaagtgttgggattacagtgtgagtcaccatgcctagcctctcttctgcttctctaattgtgcattctcagttacctttttcttttttttttttttttatgtttttcaagacggagtcttactctgttgcccagcctaaattgcaatggcgcaatctcagctcactgcaacctctgcctctcaggttcaagcgattctcctgcctctgcatcctgagtatctgggattacaggcacctgccatcatgcctggtaaatttttgtatttttgtagagatggggtttcaaccacgttggtcaagctggtcttgaactcctgactttaggtgttctgcctgcatcggccttccaaagtgctgggattacaggtgtgagccaccatccccagccttaagttaccttttcagactcctctttttgtgccctctaaatgtcgctatttcccagagttttgccctagtctactttgtctttttgtatcgtacattctttgaagcccatggattcaagagccatctataatacaagtattcccaagggcattacttcatcagataagtgccagccactaactaggtgctgtggatatagcagtgaataagatggacatagtctcatggagcttctacttggggtctgaaggcaaaactaagaaaaagtttaaaaggtagataagatcatttagaataatataagtgctattaagaatagctcagggtatgctgggcatgatggctcatgcctgtaatcccaacactttagaaggctgatgtgagaggatcccttgaggtcaggagttcaagaccagcctgggcaacatagggatcttttgtagaatctctacaaaaaataaagaaaattagttgggtacggtagcacacacctgtagtcccagctactcaggagggtgaggcaggaggatcacttgagcccaggagttcgaggctagtgagccatgatcatgccactgcactccagtctgggcaacagaacaagactgtcaaaaaaaaaaaaagtcctaactcacggtaatggaaaagagcaacagaacaagactgtcaaaaaaaaaaaaaagtcctaactcacggtaatggaaaagaaggtaactgggcaggtgcagggttggaaggctactctggatagaggggcagtgaaggtttccttgaggagatggcctttaagctgagcagggctggacctaggtgaggctagtgagcacagatttgcaggggtcgccaaaatctcagtaaccaaaataaatataattttttaatgcaataatttaaaaaagcaaaatcaatgccaaaaacattaggaatgcaataccgaaatttaaaagtaaagtgctagtaagatgaatttaattaaaaattatttaagatcatcagttggtcaagagatatgaaatatgacagtccactcagttgaaaatgagataagccaagaagtcgattttgaaaatgctattgatgaattggcttctgtggaaactagaaaaggaaaattacattaaatcctgattttggtgtaaatagaatctttaaacttaaaataacattgtgagttttaatatacttattttttaaatttttcaatattttttcaactactttaatgttctggaaaaatactgaccatttaaatgatacatataaagatgtatataggggagcgtgtttttctttcttgcctcagtctcccatggttctgtacagcactgaggctaagacctgaatgacaagaaggcagccacatggtcattgtttggaagagcctcctagacgcggggagcatgctgtgatggcattgggaataaaaggagctgagtatagtaaaggaactgatgggaccagtgtggaaatgaaggaaaatatgtgtgaaagaagattagagacatacaggggccagatcctggagatgcttatagaccagaggaagaagggtggatttttttttcttattgcattacggactcataggaagcttttaagcaagggagcgatataatttgggatttgcgaaagatcagatttgctgttgagtggagaatggactatatcagagcaggaccagaaaaggtgaaaggctggtgcagcggctcatgcctgtaatcccagcactttgggagctgaggcaggcggatcacttgagctcaggtgttctagaccagcctaggcaacatagcaagaccccatctctacaaaaaatacaaaaatgggacaggtgtggtggtgggtgcctgtagtcccagctacttgggaggctgaggcaggaggattacttgagcctggaggtcaaagctgcagtgagctgagatcatgccactgcactccagcctgggcgacagagctgaagactctctgactcaaaaaaaaaacaaaaacaaacaaacaaaaactgtctcaaaaaaaaagaaaaaatatcctgtgagaatggttaagaggcaactgcagcactgcagctgagaggggagaggcatgtctccagccacagctcatgtgtccctgctcagtctgagacccaggtaactttgcttactgggcagctcctcaggattgtcccacaggctttaaatcaaccacgccaaatctgagtttactgtcttttcccataaacctgctccaccttgctcttcctctcattgaatggatcactgctcacctaattactgaatctagaaacccgatccttgactccttctcgctggccccccaaatccagtcaaggattcacttcctttgaacccagcttctaattcaggccacccagctttcccttttctttaggctccgctgccatctccctaattcaagttgccagcatctcccttccatatcgctgcccagtcttctcactgtgcgtcctcacttgctgttttcttttctcctatctagtctccattctacaactgaagtgggttttttggttttttttgttttttttttttgagacagggtctcactctattgctcaggctggagtgcactggtacgatcacagctcactacagccttggccttgaccttccgggctccagcaatcctcctgcctcagccttccaagtagcagggaccacaggtgtgcaccactatgcccagctatgtttttcatagagatgggggcctcactatgttgtccagtctggccttgaactcctgggctcaagggacctgcccaccttgtccttgcaaagtgctgggattacagacatgagccaccacgcccggcctcaaatggtctttctaaaaacaagtgtaattgtgtcccttctgcctaaaactctttagtggcttctctcttccctcacagcaaagccctaatggtgtttgtgaggccttgtgcatctctcttgcctcctcattttccccgctcattctatgttctactgctctaatctcacatcatttgactcattggctttttcttggcactggtcctacctgctcacgatttgttctgtcttctctactcttttgtcatcattctacttaggttctaggtttcagttttgacattgtcccccagcaagcctttctcaaattcaaatccagatttgtgatttcttggcaccctctcttcatttatctcagcatgtctcacaccatttcacagcatttatggtcatagcattgacttgtctgcaaaaccactcctcagtaaggtccatgaaggcagggagtatttctttattgatactgtaccccaagcacactggttcagtctctccatcgtttcttgctctagttcttttttttttttttttttttttgagacagtgtctcactctgtcacccaggctagagtgcagtggggtgatcatcgctcactgcagactcaacctcctgggctcaagtgaccctcccacctcagcctcctaagtagctgagaccacaagtgtatgcagtcacacccagctaatgtttaaatttttattttatgtagagatgggggtctcactgtgttgcccaggctagtttcgaactcctgggctcaagcagtcctcccagttctgtctcccaaagtgctggaattagaggtatgagccacggtgcctggcccttattcaaatactgatgggagagaaagattgacctagtaaattacctattgggtagaatgttttatgccatgccaccttagcggttggggaccagcctatagattggccagtattggatcaggtggcatttctggtccaataaaagactctcttgctcaagaaacatctttcatcacttggcgactatgggtgctgaagtccccttaaaaagagctagtgggcttgttaagcattctaagtgacatattcagcataaacagcagctttggaacaaggggccaagcttgatcagcccaccttctatttatttcatagcatttactctccccaaaagacagtatttggttggatcaggttgctaccattcaacctagagcatttccattgagcaacgtttacctcccagtccaccccagcgctcctcatgcctacagaatgggttgcctgtggtttgcattgatctgtggtcccatgtggcctatgtgggtttacttaactgagaagacacatgcaacagtaaggcaaaccatgtagggaaaaaacccctcttggggtttacttccctccctcaaaaggaggcagtttaaatggcagaactttgagcattctggggctccctggcatactcacttatcaaacatcattagaaaatgagggattctgggtcagagaatcttccagacaactgaatgaattccattttaaacagcaaaacttaagaacaaaacgtttaaagcatttaatgagtatttgcttttctgctttcattaagaacacagaaggtatttaactcttaaaatgatgccgtgctgtccttattacgtgcatcagtcattgttctgggccctcagggcctattaagctgcaaagagctgtttgctccagcactaaatcgcctcccctggttgacttttattacttttgtatatgcttttaatcattatccaatatgtttctagactctgggtcttcctttaacatctcttcttgccacatcctcctctcttcagatgggctgcgctccatctattgttggctgaaaatccagaaaaccaagactgggagaggtggctattgaggttcagtaatttctttttttcttttttttttttcttcttgagactgagtcttactctgttgcccagactagagtgcagtagcaccaccacagctcactgcagtcttgacttccagagctcaagggatcctcctgcctcagcttctcatgcaccacaggtacacaccactacacccaactactttttgtattttttgtagagacggggtctccctgtgttgcccaagctggttgtgaactcttgggctcaagcaatccgcctgccttggcctcccaaaatgttggggtttcagtcatgagccactgcacttgacctggtcagtaatttctgagttagaaaatgctctagtccatgagaactatgactttccagcctaggggtatttcttccctacttcctcacctccttttgcattgtgtctcggatcctgtggcctataccatattatctatgtgctgacatttagaaaaagtaaaaatcacagtgtcaaaatctaggtttgaaagaatctcttaggatcacctagtttcacctccctagcatagtttcaccacgctctctctagcgcatgctctgagactagctgaatattccatattctttatcctggcttgttaaaggaagtatcttcaagtactgaaattgtaagttttgaggaaatagagattgatgtaggatttttcttggcccctttgctggactcacagcaggagtgccccatctacttggcctgccgtgctcagcccattgtgggagggagcacgtgggtgagtaagtgcaagacctagctggctgcccctgacacagaagcaagctctgtgtgggcccctggccagaccaggtgtgtcgcctcaaggggaatgtggcagcacccagatgagggtgcctgtgaccctgaagccccagagggggtgttacaatgctctcttagttccaccatgagacagtggactgtggcgtgttagcagctcagttggccacttgcctcgtcatggggggtggctgccctccgttggcaaaggcaaagagccagtgtgacagcctttcagggtgcccacagttggtgggtcctgagctcttgtctggtgtccaagaagaatgaggtcacactgaagattgaaggatggtgagggcagataattttattgtgagatgaaaacaactctcagtggagaggggagctggagagggaatgggaagggcaggtcatcttctccaaagtcaggttgtctcttctcctaagtcaggtcatctcctccgctactgactgagtctggggtccagagaggggagctggagagggaatgggaagagcaggttatcttctccaaagtcaggttgtctgttctcctaagtcaggtcgtctcctcctctactgactaggtctggggtccagagaggggagctggagagggaatgagaagagcaggtcatctttcccaaagtcaggttgtctcttgtcctaagtcaggtcatctcctcctctactgactgagtctggagtctttataggcacagggtggggagtgtgtgctgattggtttgtgagtatgcaagaaaggttaaagtgaagacaccactcaaaggtgggcacggcagtgtagaaaaccaattaggaaagggtaggtgtgtgtaaaataggtgaagggtgaggatcaatcagaggaaagcacgccaaacgggaagacaagttctcaatcctgtctgaggatttaacttgcagcttgggtttcaggctttaaactgtcttcaacctggaggtggggtttcaccaggtacccactcctaactgcctaggcatttggctgccccctgttgctatcaagataagcaacagtaacacttaagataagcatcccttccctgtctgaaggtagttgtctgaaccagagcttcctcttccaggtgagagctgtgtggttttggatagagatgctactgacgcagacatcctgtcatttgggaaggatggcccagagtcataggggagaagcagggagtcaccttgaggctgtttggccagagagacaggcccacatacgaaagcccagaagttgaatggccatgggctgacacagggaaatgaatgagcctgcttcatatcatccacgtcctcactccctcctttgtctgctccccttagcctgtgacaaagcagagccaatcgggtcactggtgtgggtttcagtgactgagtaaagcaggctcctccaccacacttggccacagtgtcttggagtggttcccatctgcgaagaggaaggcctgggagagacactgacctgttgtccagagtctgataagaggacaggattgaggtcatatttcagacaactcaagggagttaggatggggactagggttgttacaaacgatgaggagaattttggagcccccagcagatatttaccagctgtatcttcaaagaagaattaatcttggtctttgctgttttttctctgtctggctttgcaaacctaaaaagagacatcatgtatcttcttcagaatatattcttggaatggtagatgaggagaattaggaaataatagcccaagttaaatcagatgtataattataaaatcacagctctagggtctaagggtccttgaagattctctagttaacgcacactggttcatgcatttcaactgtaacgttacagatagccctctcttttggagcacctaaacagcagggaattcagaatgtcctaaagtagcccaggccggtattggacagttctaattcttagagattgctgtaagaaatctgattacctgtagatttcacctattgatgtttgctttgtctcatagaatagtgccaatccatcctcacatgccagacctaaaatgtgtggataactattataatcttttcaaagttaaaatgtaaacttttcaacttttgttttatttaattggcttcaagcctcttaactatgctagccacccttctccaaggaaatttcaatttgttaatggactcattatttctgataggggagcttaagatcacactggattttgcacaagctactactgttccactgcttttttattactggtattcaaacccaacaaactttgtcatataccacagggtccttagtctcaaggccttaaggcacaaagcaccgttggctgagacctttatttttattattattttattgtgttgtactttttaaagagatgggatcttgctctatggcacaggctggagtgcagtggtgcactcatggctcactgcagtctccagctcctcagctcaagcaatcctttcagcctctgagtagctgggatcacaggcataagccaccatgcccagctgctgaaacctttagttgaccacagagatcaagctgagtgccaggccagttcttgaaatttgcatattgatggagctgaagagggcttctgtcctcagtgaccatcttgggtttgtcgtgggaatctgcaatatcctctgtccaacaggctcagcttgatctctgatgtcacctaaaggtttcagtcaccaggcacaatggctcatacctgtagtcccagcactttgggaagccaaagcgggaggattgcttgagcccaggagtgcaaaaccagcctgggcaacttagtgcgacactgtctctacaaaaaaaatttttttaaaattagccaggtgtggttgtgcacacctgtagtctgaggaggctgaagtgtgagaatcccttcagcccaagagttggaggctacatgagctattatcacaccactgcactcacaacagagtgagaccccatcaccaaacaaaaccaaaagaattggccttgtggcttcctcactgagaaggggagcgaagtgctgcaggctgtaactatgggttgagacttggaagcttcttcatggggagcagggtgccaagacaagggatggaggagtcattctgggggcgagtcctaacaagagcccagggatgagataagaggcattgtgcatgttatgctgaccacaaaacaagaccggccaagaagagactggaaggcacattgtttctggtggcctgatcacagaaaatggtggaaatctggtttttaatcactcaggagagttttttctggcttcaccctatctggtctttcaaggagctgaaggggtatttgtcattgtgaactagggcagatccttgcattgcaaatttatgaatgttggcccatctcagattgtttgagcagatttgaggcctgaaatctgttatctatccctcctagtttcctgtcatccgctgatttaatgaacatatcgtcattgtcctcatgtaagtcactgcaaatgtttcacggaggaggccaaggacagatagttctatggcatgatataaaaacctcccttcaggttgacagtcatttattaatcaaactctttgaggagagccatccaagtgcttgctaatgtatctaatggtaccagcattgagctcaaatttctgaatctggtccagaaggatctaatgagaaagtgtccaacgccttgccgaggggtaacttattatgttttgcaattctatgtgccaaaagcagagtggaggttagactggcatgatttattcttagttaacccattctgactcttggtgatcactgttttcctttcaaaatatatcaacaatccattcctttagtccactgctctttagtttatagaatctttttttttcaccttttcttgaaaagtgggaacatatttaatcctctccagcctacagagacttccctcattctccacagttgttcagaaagtatctgtagcatttcacttttcattatttcttcaagaccttggtagtataattggtttatttatttatttatttatttatttttgagacaggatcttattctgtcacctagactggagtacagtggtgccatcatggctcactgcagccttgacctcccaggctcaggtgatcctcccacctcagctttcctggtagctgggactataggaactccccaccatgcccaactaattattttgtatttttttgtagagacagggtttcaccatgttgcccaggctggtctcgaactcctgggctcaagtgatccacctgtcttggcctccccaagtgttgggattacaggcatgagccactgagcctggcctttggtataattggtgtagatatggagatctgaactcattgagagcaataacaaccaactttggcttttctcttacaatgtttgtattatctttcctaatatgaagatcaattgccttgagataagatagaaagaaaaaaaataaactggagctgagtagttctattttcatctatgatcaattaatattcagtctcttccccaagcataagacttccttagtcttcttgcacttgatatacctttaaactcccatctgcttcttggttatcagtggtacttatctaggctaaaacccagaaaagtgctaatacagtttttatagatgactgacatggagttcttttttgttttttaaataattgttttaatttattccagaaccacctagtcatggtgaaacctaactttattaagctcctgattttggagacctacaatatcctgccttctgtatagaagaagtatagcctttctaccgctgcctccatcgtttgcttaaactaatgtgagtgagtctcctttataataatcaaatgggcctaaccagaaccaccagcaaccttcatgctttgttgctttgggcttctgagactgtcccttttaaggtagtcttcgtgtttggtttaggcactctttgtagaggatccttcattctcccaaaaaaactgctgtttgaaaaccaacatgggccagtatttcccagatccctttggtaaccactgtcatgatcgtgcccaacaaaatgctggcacttgtgggtgctccaaatgcttgcttgaatgaagcaatgattgaagagaagtctctagcccctgaaaatgctctcaaaaagccaaaggaaagctccatggggttagcagaaaaaagaaagggagagagaaagagaaattctacacaatcatgaatttctttccccttcgtctttctttctctgcttccgtgtcagagagagacttagaggtgtgctggaacacaagtcacagaagaaggaagtagagaaggaaggggaaaggtaagaaaaaaaggaaacggacattgtcatataagagggggagtcatggcatttcaaacctagaagggactcaagcatccatttagcctaacttcttcatgtcactgatgaaatatgagcatttggtttggcatttaatacaaatctgctgaaaaaaaaaagtgaagaaattgaggtcgaaagacgtaggttaaacaatttgtctaaagttacaaagctagtgagtgtcagagtgagggctagaagccagcccacctatccagtaatctcccaccacttggctctcagggtggccgaggaggggacagaagagaggggtcaggatgagaggggaatggcggggtgggcggatggcagactaagtgggaggagaaaaactaaatttgcacgtcggctgttggcctcccttgtgacttgcttttctccaagcagaagaaagtttacagccacctcacctactcaatctgaacttcacggtttccccatcccgccagagtgctctagttggctggaggcctggtcgagactgccctgtgacacaactagctagctgcacaaccagggcaaaatactgctggattaacccatgctaatgggttacctttatttagtaatcatgggtccctcataagcatggtccagatccgaactgtttttggaaagatcttggactttctagaatttcacctaccctggagtatgaaaacacactgaaacagaactggataaggattttaaacagaacttgcaagtgagatcatcatgtccccaccaccactaccctgctgcctcctgacccaagatgatgaagaactgcagcagatttttaaaaaatgttccacattccctttgcttctcatctctagaaaactctccagatcaagaactttggccttggagtatggagttggaggtcatgcagacctgatttcaaacgcaagctgtcacatggttgcgttacagtggggaggggacttaccatcttgaagacaatttagatagtaatagcaacatggaaagactgtgaagacacttatgattttgtgggaccacagtgcctgggaaacatcacgtgattcatacatgttgattacatgtgttgcttgaatgaggccctgtgggcttgaatcctaacaccctcactctccagcagtgtgaacttggagcaagttacttgattttcttttatttttaattaattattattattttttagagatggagtctcactctgttgccccggctggagggcagtgacgtgatcatagctctctacaacctcaaactcctgggctcaagcaatcctcccgcctcagcctcctgagcagctaggactaaaagcctgcacccccatgcccagctaatttttaaagctaattttatagagatggtgtctcactatgttctccaggctgatctccaactgctggcctcaagtgatcctcctgccttggcccttcaaagctttaggattacaggcatggccactgtgcctggccttacttgatttctttatatgttggttttcttacctgtaataaggatatctaattgcagatatcttatggagatactaacagtgactgcctcatagatgtgaggataaatggaaataatgcacatgcaatgcttagcacagaagctaacagatgatcaaccttagctctcgtgattatttcctcatgtcatgtgatttcttgatgaacgccttggtgtcttggggggcaccaaacaagctggtttaaagtccgtgttcaaaacatctgccaagggcagcctggcaccacgcttgggataaatgtcttcactccaacacagcctcatctgggctaagggagtcaagcatcaggttttatgggtctgacgaagatgtttgaaatattgtaggagactgtcaaggaatacttatacccactctgaaaaagggccgttcttaattttcatctttcctgtaagtcagaaagatatatactctccaaataatggcagtttccttgtcctgaagttatggcagcttggtgatacaataaacagcaccctgtcataaggaccacataaaacatggtctgacatttctttaaaagtaaaaagaaacacaaccgcagcagatgacctttcctccgagggcacagctgttttgtgtggttagagggacccgcagtctcatatttgggggctacgatatacgactggcttttcacaaagtgtttccatgagaaactacagtacgttccaaaggggagcaccaattcacatcaggcagggaggatttttttcccctcttgatgttttccaaatgatatttgtgctgaatatttgctattagaaacttctttggtgcatgaagtgtgagtggtatcgagaataccaaggtgtcttttgcttcctggtggagtttgatggtgggctttctaccgggttggtgagccagcaccttcgtggacttatgaggagtcactcaagcagtggtgcttctgtgggtcaggactggaagtttctgggggaaaatttaaactagtccctttgttagagatggtaggcgatttccatttcatctaaaaatgtttattccttttgttgaatattatttgtgcaatgtgctaaaatgaacatttaataaatctaaaaaatgtctagttgtacatatgttagtgagactggatgttttcttcttttccttgttctccaaattatctttaacatgtttttatttacatcctaataaaaatgaaattaaaaaggagtgttacatctccatttaattttctgattgagttatcctggacatcagtggtaactgaaaacattcctattaaagcactagatcccctcccctcaaaacctctatcctctaaattagaataataagccctttgagatgggaatttggcagcctctccacaggatggagaggagcatatgtcaattactgatggccgtggtgccgagataaaaatgtggtcttgttgctcatatccaaaatcctgctactgacctgacaacagcagaacactgagtgcatgtcccagtatggtgggagatttgttctgatttatctctggtctctcaccttgtcccctgtgtgaccaaagctgggcatatgcaaaatgactggcctggttgagaagtacaaggtgaggcccccgaaacagttgacttattggtaattagaccacactggtattgaacccatgacctcagcctcattagagctgcattcaggccaactgagttgaccagaaacagattcaaaacagtgagtgatagaggtctttggtgcagggtcaaaggcctatttacactacccaagagcataagtgggttcctactctaccgtgttaaaggagcggcagcagacaagatggcccagtgggtaggtcatgattccctgctttatacaattgtacagcattgctgttctggccaactcccaccttcctttaactaggtcttcatgtaactcacaggttaaaaaggagagagacaagtgtttcaacaggactcttcccgtccccgcccctgccaagttgctaatggcttatagtaacaaaaacactaggactaaagtccatttctttaggaaggagttcctttgaaatgacactctttaaattaaaaatatccaagtctaaaatggtgtccatggtgaattattattttcatcctttgcttttcaaggagatctaaacacagctgaccagtgatcactttgtgtagaaaaggaatcggtttcccagtgggagagcaaaatacatggaaaaggcaagacatgggactgatgagatctgtgtgctacatcaaggaaacagactagaaataaactcaatatatgacagaatgttatgtgtgataacagtggcacttccagtgggaggagaatagattgcttaataatggccggccatttaattaagagagtttataaaatctctccttcagaccacatccaaagtgaagatttagatgtgaaaataaaactttacaattctaaaatataactgagtaattttttagtaatcttggaaggcttttctgtgcttaaaagtacagaaatcataaaaaaaagagataatttcattctgtaaaaatgtattatgaaaacttatgtatatataaaatactaaatattaaaaggcatactaggtgaccatatttttggtgcctatggaagagttaacctaaagatatttataatgcagatggaagatttaataagaaagcatttagaaatcaacaagaaaaagatgaacaacttaatagaaaacagatgaaagaaatggacatccttcacatcagaaaaaatgtaaatggccagtaaatccatgaacaatatatttaacttccttggtaaagtcaagaagtacacattttaatcaattgaaagttaacttttttcccaaaaaaatggccaagataaaaataaaatcactgacagtgttgcaaggaaattactacttttttataccacttgtggccatataaattgctataacttttctagagggttatttgacaatacagaagaaaagtcttaaaattttacatgggccatgacccagaaattctacttgtgggaataaatctgagaggaataatcatgtatttgtgcaaagattttgctattagaatgttgatcaaagcatttttataataactaaaaatgggaaacatcttaaatctcttacaataggttacatatatcatggtgtatgatgtatgttgggacttcatgcaatcataacatattgtagaaaaaaattaaaaaattatatctcatatcatggaaaaatattcactaatgtcttgttaaaaaagtagcttcaaactgataatattataaattacatatgcatagaaaaaaatggtagataatatatatcacatatatcaaaatgctaaaattgttttcctctagctgcaggaattataaatgtttttaaatgtttctttttatcagatttttttttacagtgaatacattatttggagcacaaaaggtaaagcaatatattttgtttcaaatactatagctgtcacagtttaatcatggagattaagtgggataatgtataagaaagttcctaatacaggattagaaagataagggggccttggtactggagatctgaatttgaatctaaaatgttaccaagtagtccaagaactttgagcactctccatttaagattgacttccctagttggtgaattatatgagcccaaagtgactctctttcttctgtgttcttgttagactttctatttcaatggctcatacatctctccataagatggcaggcaagaagcagaggaaaagaaataaattcccatctgtcattttaagatcattcctatcatattcattttcctcactgtaccgtaaagcacactgtagtgggactcccttctttaaggcaaactgaagcaataagtcttccttctccagcattactgggttcagtagcaattgttgtattatcttttatgctacacaaaaatagatgttatctgcatgcaaactgaacatcaaagtgaacccaagacttatgacctatggattggttatggaagcacagaggttttggctgacaaggagggatggggcttagggctggtgaggtgaatgcttaggcggtgggaagtggagcaagatggggacagtgctggagctggcatggaggtggttctctgttagcaccagagttcacatctgggtctatgggaaataaaaagaagggaaccctacacatgggaatgtaaaatgtgctctatacaaaggatccccttaagatttgggatataacacatctcttttttggccatccttgtgagagaccttgtcactaaggggcctgtgtgtgtatacgtgtgtgtatgcatgtgtgtacactcacagggtactggtggctgagtggttgctgtaggtgggcgttaggatttagagggagatttttccttactccacagaatgtagtgttggtgcaatgctggaagctgaaggacacaatggcaatcctttttggtgacattaaaggggcagtgaaagagacgatggaaccaaaattatgcagatggacacgacactgtggctgtcggggcttgttcttgtgcattgtaaaccccctccgaggccctgagacataacactggggaactggttagggggctggatattccattacagcaagtagggtagaaacactcaacaaaatatggattactactgttaatgtaactttcctttaaatcccggccttaagtgtcctgggaaaacgtgtgtgacatagacaagtgttagtttctgtgattgattgagctggctggagcttggtactaatgagaccaaggccaaggcacttggctgtatccccatagggtctgttagtgtttcatggctccaaatctgaggtgacaccctttacccttgcacatattggggattgggtgagagagtatagtgtctgactccagtctaatgctattccaacaccatgctttcccctctaacacaatgccacttctctgagtacatgtgtagccgacttgtgtaataggacaatctaatcaatgacactgtctctagagccacattgcacttaaaaagcagaggctgccagaatgaaggacagcaaaggtttctggtcatttcagtggatccaggttgttctaccaattggcagtcacaggcaaagcaaatagagtttgaaataaaccatgcccaggttaccctgttgcctgagagtttgactacaaaccttggttctttctctgccttttaagaagtagttggtaatctttagccatgtaaatgttgaaaagagtcaagttgaatgctttacccagatgccctgaatcctccaccttgaagtgtcctgtcactttaggattaatatgtgggaccagtcagcttagacctgggtgatatggtttggctgtgattcccatccagatctcatcttgaattgtaatccccataatccctacatgtagagggagggtcctggtgagaggtgattggcttatgggggcggtttccctcatgttgttctaatgatagtgagtgagttctcacaagatctgatggttttataagtgtttgacagttccttcttagcatcctcccttgcctgctgccatgtaagatgtgcctgcttcttcttccaccatgattgtaagtttcctgaggcctccccagccatgcggaactgtgagtcaattaaacctcttttcttcatagattaccgagtcttgggcagttcgttatagcagtgtgagaatggactaatacactgaggctcagagtaaaaccaagccttgttatcctggtcacatgggctttctggggcctgtgtcacagcattgggtcagaaggaaaggaagggagagatcaaaattcaaacccagcctggggttctgcttccacttaagatatagaaagccacaagagaacattgcttccaccctaacgttgagcaaaagctgggcaatctacaaaatcataactttttttgagcccatcggagagctgaggtcacaaggcaacccaaactgaattccagtgttggggcagtaagcccatccgaggagacctgagacacatgaactactgtgctttctgcaaggcatgggaagaagtggcaaccgtgagcagctgaaatgttagcagattctcaaaggccaagtatgggttcatgctacttgctagttatttgaccactgacagggcgctgggcaatgagctgagtagggacttttttgaagtggtcagcctcgtttggatcctttttattctagagtaatggaaagtgggtatcttggttatctacagctgtgtgacaaccccaatctcagcagcttaaaacaaacacttattatctcccagtttgtgagtcaggaattctggtgcagcttagggttaggatggaagggcctagagttgtaagaacaatgggagaaggaaggaaataaacacgtgtcacatgctttatgttatgtcatcaagtgctcaatacaaacccatgtaaaaggtgttaaccccattttacaaatgagaaatcaaggctcagagagggtaagtgtctttctccatatattatatattatatgtaggttatataggtattgcgatggttgcacaactctgtaaatacactaaaaatcattgcattatacacttaaaacagataaattctatgacacacttaaaacagataaattatacacttaaaacagataaattctatgatatgtaaattatatctcaataagctattttttggaccatgcaggtagtatgcagtaaagtaggtaatttcaaacctaattatttttgactctgtattagtttgctcaggctaccgtgacaaaatgccacagtctgggtggcttaaagaatagaaatttattttctcatggttctagaggttagaagtctgagatcagggtgttggcatgtttagtttctttggaggcctctctccttggcttgcagacggctgccttctcttccctgtgtcttcacatggtcttctctctgtgtctgtgtcctaatctcttctcataaggacaccagtcgtattggattagggcccaccctaacaacctcattttaacttaattaccccttaaagaccttatctccaaatatagtcacattctgaattactgagtgttggaacttcaacactggagggacacatcacagactccagcttatttttttcttctgtagacactttttcagacaatagaagtccattgttgtgtttgttcatgaaatctgctcataaacatcaatgtataaaaaggaattttttcccctggctttattagtgtaatacttgttttgttctggtagaacaatattgggaaaattgtcatttctacatttgcaaatagtaacagtttaaaataaacagctcatattgcaatctctggatactcttcaaatacactgatgcagagcccaaaagaaaaatagttggatttaaaaaaaaaacttgggttgaattactaccaatatttaacatctgttaatattctttatcgctaagagataaacaaaataaaacaaaataaaaaacatccaaaaatgtataacaaatgctagcgctatttgtaatatgatgttattgcaagtcttgtcatctctttcctggttactgtacaactgacagatgctgggagacacatgctctgagcagatatgcatgagcacagtcagttcatgttaaaagaacatacgtgcatgtacaacgttacacgaggagtcatacattggcctgggtttgtaaaaagtccagacacacaggctaatttactggtgtcctaatgtgttaaaatgtgacgtataagacattcaatggtgcatttaacttttttaaaggtaaaactagtttttaaagatatgtgattcacatatttgtcaaacccttgtgtaacctggggttcaggggtatgcattttgaaactgcctgcaatatatctcagagctctccacacttcccatgtcattgacaactgaccctcgaactggtctggctcagacaccatggatggctggcgggcggttgacacaggcaggacctggcttgtgagcttatctcagatgtatcagagcataaaccggaggatgggagacccactgagggaaaagccaggtatgtgcttggaagaacaattccaggacgatttgagctaaaggcttccttctgggttcactaacccatggaattaaagggccatgggcgaatccctcttatctgttctccagatcaaccacaaacctgagcattccccaggaagaatcgagtgtcacttaaaggcaaccactgtctttctgtctgcttcctccctcaattagagaaggctttgtagcactgggaccaaatgagtcaataaaaggggcttattgaccatttggcactcagatgggagccaggtctctcagcctcttcctggttctcatttattcttcctccacacccctcgccccatcttttaaaccaattaagggaactgcagatttggttcaagtgccacaaaagctgttctttttgagtagtgagtttttcagtcaacgaggagagtccagccaaaatccctttatctcaaagacaaacaaaggaagctaatgagggagatgggaggatgggggaacaagggacattctggaagctttagcaattcctccgaggagataatgtgattttatgcgggctgaatgttgtgcacggaacctttcagccaagaatctcgcgatcatgcagtgtttatccacgggatggcaacagagagccatctatgcctgcgtcccggctcctggaataacttcacctcaatgttgctgaagtttaaaatcccttttctttattgaatggaacaataccaagaattttgcttaagaggtgtttgattcttgactgtttagagccccccttctcgctctgtgcccactttctatctcttcacatccacctgtggccacgcttgttatttttcattattaggaaaataggtgtggatatggacggtcactgttttaacctccttagcaaactgccaaggaatattttcctcttttccttttagacaacagcacatgttactctttgaaaaaatatttttcttttaattgagaactaagtagccaaccttgctgcgtatgaagttttttttttgcctcctccctacagacaatcagacctgtcttttgtcagactccaggctaaatgtctccttctttgggcaggtcattgcctcctggcctggtctgaccaccgagaagacaatgtgaggttttgtgggaagtttgagagaagagtgaggaaactcgagtggcttcctgctctcaagagggaaagcctgggtgatatggcgcacaccaaggcccgtgggggttgctgctctcctgggacttaattgatggtgttgttctagaaacaaagaattgctgaggaggagttggagcaagacagagacagaaaaggcagggacttcttgatgtagccatcttgtgagtttgaaatagctgcatatctctttggctctgagtgcagtcagtaacgtgtaggtgccactggcttgactatcacattggaaaagagagcaggggtaaaaattaaagaagaaagagaagacaagaaaggagagggagagagaatagaagaagaatggagtgttctcatgatagaggtcacctaccgatgcttgtaagacagtccttgctggagctcccagagccttccacgtcacgtccgcagccttgcctggctctctgcccaagttgtgtgcaggacacaccaagagccagattccaaccactggggagtcaagagggccatgggctggctgcagggatccaagtggctgatggatatccagcccaagaatctgtcccttggcctgggactcatagtgggagtccagaaaagaccccaaatcagtgtctgttgagctgagaactggagccggactgtacaacttcccctgggatcctgaaaccgtctcccacagtgtcagccactgattgtccctgtagcctggagctccaaaggaagggtctgaggccagcaggagaggcagcatggtcagaggaggcatgtagacaagggaaaaggagaaaggccggtctgtgagtgtgcgctggagtgccagagcatgcttattcagaggcccttaggtggggaggtccagaaatcagaatcaaagaagagacttctctggggacatcttttgaatcatattgaatataaccttatgttgggcctggtgtgatggctcacgcctgtattcccagcattttgggaggctgaggcgggtggatcacctggggtcaggagtttgagaccagcctggccaacatggtgaaacctcatctttactaaaaatacaaacattagccaggtgtggtggtgcatgcctgtagtcccagctactcgggatgccgaggcaggagaattgcttgaacctaggaggcggaggttgtagttagccaagatcgcaccattgcattctagcctgagcaacagtgtgagactctgtctcaataaataaataaataaataaataaataaataaataaataaatataatgtaactttatattcaatcaaatatcactatttcatatttgtataaacttatataacaagcaaaacaaaagaagggccttcttggccaagagcatattggaaaggcaagacagggaaattctctcaagagatgacagaatttgattctgcttttggagtacatatgaaactgtttctgtatttgaaagccagttcatacccatttattgtgttcagagcattgttgatttcctgaatgtttcatggctggtaacattgaggtcaaggtatggtatgagctgtgcctctcacaccatttgatatttctgacttaaccactgaattatttttgtttacttcaaccttcaaccctcagcaaaaataatactatatatttgtacaagactgaatacaagtgacttatccagtgtcacctgtaaggtgttaaaggagtggggcagaagtcaggcaaaacctagtgtttattttacatttcagttttgcagttatttatatatatatcttacagaatatcccatcctgggcaacataacaagactccatctctgcaaaaaataaaaaaattagccaggtgtgatggcatgcacctataatctcaggctactttgaaggctgagacaggaggatggcttgagcccaggaatttgagctataatcatgccaccacctgggtgacagaaaaaaaaaagaatataatgtttataagatactttattaaatatttcttattttaattcaattttttagtttcttagttgtcctccactctctttacgctgtaaagtgagaccagaaaatgagacatcagagagtgttgtgatgttctatgaccatccttgactgtgtgtggcagggtatggttagggaatgggaagacattagggaggagtttggccatggcaaaactgtagaccaattccatcttcttggtactggcacagccccttaaccttcatagtcctggccaatacttaccactctccttctatgacaattgttttatctacataagatatagtttttatgtatcttaaaatgactagacagcaaactaaaagtatttcttcttatgcaatgaaatctgatgtctaaaagtcagaggtttagaggtttttaacttggagattagaagaaggaatcatttttttaaagatgaacactcataaggtattattgtcctgaaggattcttcgaatatcttttgataatttttaacgtaatgagattgggaaatctccaaagccatagaactgcattggcaggcagtaaaatggtttttaaatttttcaagttagccactcttcggttgttctcgtattctaactcacccagatatccagtgggattgagaactggccctaatggaaccttcagcaggaagacttcattacactatccctcatttaatcttctcgcgtaaaatattcctaacaccgggtcccttggcaaacgccctaaagaagtttcatttcaataatattgctttgtatttatataacctctatatccaaggagcttaaaaacacttacggcccatgcttcattacttagtttaaccaaaaagacagtcagcccatttcatattaacaaatttaagggctccctttggagacaggtagtaataatagcacttggtatgacacatttctctcccaggaagctcaaagtaatttggacaatgaaatgactgaagaatctaaggaacagaccaagcaagtttttggtcaaaagacaacacagcaaaaagcaggcacactggaaatcagagacaggacttgactccagtcagtattccattcacactagttgcaagtaagtagtggtaaattagaggaaaagggaaagtgacttccttttattctttgtggcaaatcttgtgcagtttcatttttgttctcgactaaaaggaagagtctcccaggccttcctctgcatccagatgtgaggctgcattttttatctctgtgttctggctagttctcccaagatgttgatggaacaacacagaacattatctatggtaaagttgcaattaacccagtactcagggagtgaggcattttagttctttgaattaaatagtcaatgaatgtcccatagtaaacccttcctgtttgaatgcttcttaatgtctggagaccaaggttgaatctctcgttggtgattctggttctctgagttccagtccctatccagaccagctcatcattgtcagacctgctgatagatcaaagatgagaaatgggaaggagaccttgttctggtctctgggtggagccctgcgttgtattttcaccaaatacgggagaatccctgctgtgtgtttcacatttacctgtccctacttctctcttcccctaaacccattcttctagagtcttggcatggtgatgcctcagtcaacaaggattcaccatggtgcagaggctcagagagtgtggagattgtgttgctgagtgctgtggttactgcacattgtccatctgggcgtttggtcctttgtctgtctcccctttgtgctcctcttgggaaaacttgggatgcagttcaggaaaggcagaactctgcatgactctttctccatactgtatgtttaaaacctgcccttgatgcctgatctcattccctgtgccatgtagttgtacaattcctatgtttgttgttttatgtgggggtgggggtgtgggaataatacggggtggggggtgggaataatacattttcagtctcctataaataaccctctaatgcccctcagagttatctgtcttcccagttcccatcaacaacatgagctggttggtcccttgaacagagcctagcatagaacttcttgggggcacatgtgtaactggctatgcccgtaatcttaggatgagttttcttgccccaaagaagtctgatttaatctcaagtgaaatacaggctgcgggatccattgtttagagactccaggcttctcagagtaaacactccatagcgagagacctctaggttgcttggcatagatatggcaacctgaacttggccctgtctccgagcgcatatggtgttccaagtcaggatcacacgcggcaatttaccatactgtgcatggggaaaatatttatagggtaataaatgtgagcaaagcatgtttgtgctctgtgcataattggcagtagaatatgtagatgaactgatttcttgtattcctctttaaggagatatggccagatgccctcccaaacatgtcttggagcatagccttcaactccagggcaagggatgaggctgggggaagaggaagtccttcaccggtttaggactaatacctcgtaatgaattcagggacttccaagtatgatctggctaaacaacaaatatagattttttttctctaaaagcatattcttctatatgtggaatatggatcaaccttgtgaaataagctttatgtagagctttgcagacataaagaagaatgtgaacatgataggactattgttacagcaaataaaggcaggagaaattgtctcagtgagacaaacttctctgttcgggatgtaaatctctgttcagagatttgttgacaaagaattcagaaagtgcattttcaactgtgtaatttcattagatactatgtgatcattccaacataactgtaatgttattgaatagttatagcacctttacttttaaaaaggccatagaacaatagaaaatctctaaaaacaaattccataggttaaaaagattttttaaagttccacttttagtaaatatttcacaagtatgttagcagaggggcagatttattgaataaaagaaacagtcatgtttaaggataatttgcaaaattgtcagcatacatttttcaataaaatttaaaattggggttacatttctttttgtgaaagaaacctctcatagttttcctgcctgcttgctattgttatatcttggggagatttctcttcacattccttttgcattattgtaacagacaagtctaaggcactgtctaatgttaattctacacactgctgccaattataatcagagctagtcaaaataaacaaattaaacaaataaacatgtcaaaacatctctgatttagggaaaataagccaagtctgaactctcccagtgtttcggcataaatgatgggctgtgggttgtaaaacgctccataacattttttcacctttgctaggggaaggtgggtcagtttagaattacagcactgctcaactttgagaaaggggtctgcgactgaaaccaaatcaaacccaaatgttgctggcttcacctagggtagtaatgatctgccgcgtgctctaaatgctttaaagagaaaaaaggagagaaagaaaaagcagttgattctttgctgatgcgatgccagaacccctaaatcactggagaggttgaacacaatgcaggtgaaaatataccaaaggcggatgtacatttcaatatgaaacagactgtcactgtgacatttcccaatcagcacattgaaaatactaggcaattaagttagaaagctctactggcttcaagaagggatataaaacatgactttgctacccaagtaggatatcttggcttgaactatgcttaaataacaagacgggtagctgtgtgtgtgtgtgtgtgtgtgtgtgtgtgtgtgtactggtatgcagctgtgtgtgtgtgtgtgtgtgtgtgtgtagtggtatgttaacctataaaaatatgaagagaggttaagggagaaggctgtcattctggcaggtggttcttgtaaaaaggtgatctctcgaagttcaagaaatttctaaatatctacacccacccctaggcagcaagccacaaagcaggtgatttgtgtagagtccttggtgttcttccttcaaccagtactgagccagcaccaactgtgtgccaggcacaaggtaacaaaaacgagcaggactcagtccatgccttcaaggaatctcccttggttattgagaagttttttttttttctttcaccaaccaagaagaagtgttgacccatcgggaagtttaaatgttgcgtttaagacagggcagttggtgatgggcagcaaggaagaaccagggagactgggctctgacatctcttgctgttccaacttcacctttcacttgtcagggaacaggatttgggaaaggttatactccaaggagaggggctttgcaaaggagtgagaggagtgacattccctacctccagaagacaggacttgattacttctctcggctcccatggcttttatttttaatgtgcactgtgcttggaagggaaggggctgggggtggaaatcattgtgcctttgaaacgttgttttctgaggacagtatatagaatcttggttattaacaacctctcacaagacagttatttttggagtggcctcttaggaggcaacctcttggaagtgaactcatttattttgcgtctcactgtcctgccatttcctgcggagagaggggaaaagtgaaaccacatgttttgaggagcgaatggaggaaatccctccgaagacaaatgacgactcctctcccctggcaattagtcaaacctgggcttcaggccagcccaggtgttcccgactgtgtataaatttgccaaagaacaatgaaaatagcagttgattgtgctgacagattcttctgataatttcctgttgtttggcatcttcaggttactttcccacaattatggctgctgatgaagtctggggcccttcgaagtaattttccaactctctccctgcccctttctgtcatcccaccgacaagcagcctcttttccccaacttaaaagaaacgaaacaatcaaaatccgaaaccaagttaaaaatatttcggagttgtggattttttccccctttcccagatgtttgaatttaatccccttgcaaaatacatattttaatgagactgcatttaaaagaggaagaaaaaatgatttgcacctgcatcatatagagtttcttggcaactgtgagctgggattcaggctcctttggattctccaacttgcaagttggaaggtttccttgtgttgtctgctaatatctaatctcagcaaagatcagggtcagctggtgctctgctgagagagattggaatcaaattgagcgccaatcaaaagggcagccccaaacaggcttgggtatcattttgatgttttttcctgcctaagtaaatacctttgctcaaagactgctccctgttcccaatcttcagtttaggacattgaaactactattatatgtgggtggaagttatacttgcacccaaagcatttgggggtaaaatgaaaataagggaaattgcacacttttctcaaatctccacattatccaatctgtcaggaagctatgcatactttcttggttagaacaactatgtaaaagattttttttttttgaggggctaggaagctggagctattgttgagaagcagccaagaagctggtttctttctcttcacttctcccctccctggcccctcaagcccctgaggagagagtcaacgtgaatgctgcaatgtgggtttgcaagagttgctgaggatatattagactagagcataatgtattgaatttttccaaacagggctccgtgtcccctattaatcaggacttctagtcaggagaattgcaaatgaaataaaaaattccaggataatccagagcatttgaaaagaaggtcaagctcagaaatgatgacatctgaaaaatgtttttgagattggctttgaatacctgtcagtccactcagttctggatatattttcagtagaaagagtgtctttctttttgtgttcagatgagaactgtggggaaaaaaaaacctcactgaacatatataaagctgaaagcaactgggaaaaggtttttctagattcctggacaccttaaaaataataacaaaacatccaggtgaagggagggttggaggacactggaaatgacgagagatgtggaaatgtgctggtttcgtgtgacctgtcagtaactcccccaccccactcccatgcatactcaatgaccacgtgtttgggactatggataaagggagctagttacattttcagaaaaaatgcctttcattcatgttacttgttatgcctttcatcaagaaagccattcacttatttattttgtattcattcattaatttattcaccaatttacttaccgtttgtttgaatggcctccatgtgttggatggaagtcaaagtattttacctctgctattgagcataatttaatctgcgtcttcccttttgtgaaatcgtccttacccttaaaggttccaatcaagagcacctccttcatgcagtcttcctttcttttacactccggttcttatcaatcttcattttctctaactatccacgacatatgttcattcatccaaacatagtgaagggacgcttacaatgtgcattgtgctggaggggggaatatcatgtgaattaagacaatcacagttcctgacctcatgaatgttattgttattattattattattattgttattgttgttgttatttagagacagggtcttgctctttcaccctgctggagtgcagtggcatgatcacagctcactgcagtcttgacctcctgggctcaagtgatcctcccctttaagcctcctgagtagctgggactacaggtatgcaccagcacacctggctaatttgtatattttttgtagagatggggtctcgccatattgcccaggctggtcttgaactcctaggcttaagcaatcctcctgccttggcctcccaaagtgctgggattacaggcgtgagccactgcacccggcaacctcatggattttaaagtgtaatggtggcagcaatcagttaaataaatacttatactatggtatattaaatgctataatataggaggataggaagttgtgggaacagggagagaggtcctgatgggtgatgtttaagctaagacttgaaggataggcagtagtcagcctgccaggctgtgtgcaaatattccacgcagagggaagtacatgaatagacatgagagagaggaagaggcatgctgggaaaagacgcatttcagttctgcaggacatggtataaacttcccaggacacatagaggaccaggaggaaggagattggtaagacacgagaccctagcggtaagcggaggcccagtcccaagtggcctttaacaccattgtaaggaatgtggactttatctggaggtgaagctgttgaaatgtttcaagcatgcaagtggcataattaggtttgtgtcttggaaagtggctctacttgtggtgtagaatggattgggtgaagccttgcaagtgaaggttgtcttaaatggaaatcacctacttttgtgctcaattgtatgctgtcttctcccttctttgttctatgtgtattggcctttactctagctagatcacaggcatcttcagacaggaaccatgttttatccttctgtgcacaaatgatagtagatgctcagtagatatttgcagtagtttgattttatgtttatgttgctcccttttcagtgtgccatttcaacatctctggctatgcaatagcccttcagtgggcaataaagagagggagacctttttctgggtgagtcccataaaaacaatctctgaacctcagtttaccaagacgaaaatccactctttgcctttttgctttgttaattctcaagagagaagagctgtgatttgtaccacagacaatttccaacattcaaagtcgaagtacgtttcccaaaaggctgggcaaattccagttgtagagttagacagaaagagagtgttggtgttgtttgcaaggccacggaggtacagactggtggttaattccctcgtacttctctggaaaagtagctcccctccaccacccaccaggcacattcctcaacatccaccagggaatctgaccccgttagcacttaatatttatgaccaacatttgctggtgattatattaacagtcaaatgattataattctaaatgcaatttgtgtgtgtgtgcatgtgtgtgtgcacacttgcatcagggggaggttggtattcttgcagcaaatatattgtctcctttaaattgtatccgcataataccaaattggaaattgcgctaatgtacttattaaagaatatagaggcaaagaatgtagtcccaggaaagggtgtgttacaggtgaggaaattgaaggcaagaaagagtctttgttttgggccatgcagagacagcagagttggaactaaaactaggtatctcgactcccaattcagtgctctctccacagtgccccagggcttttcctctatgtgtttattgccttcacacagtgcttgtctgaaagccaggcttggtgtttttatgtttatccagacatttcgtcttgcccccatttccttgccatctctttgggcattggaggctactgtccccctgtgggggttgcaggtagcacccatgttctgtggtttttccctcctgcaatcacttggccaggagctcagaccccaggcatccacattttagttttgggaggacaaggatatttgtttccttcactaattctttaagctttctctctagcttccctgactacctcctcctccactctctcgagcaacttgggtcacctgtattaacttctgtccatcttcacattagctgtggtgcccaatctttatttgtttattattttttggagatggagtcttgctctgtcacccaggtcagagtgcagtagagcgatctcggctcattgcaacctctacctcccaggctcaagcagttcttgtgcctcagcctccccagtagctgggattacaggtgtgtaccaacacgcctggctaacttttttattttagtagtgatggggtttcgccatgttgcccaaactggtctcaaactcctgagctcaggcaatccacccgcctcagcctcccacaatgctgagattacaggcatgagccactgcaccaggctgatgtccaatctttattcattaatttgtcactttcacaaattttgccatagccatatccagactgtactcaatgttatgtttttttctttagatcacctaattggtttcttaaacttgaatacatttgttttaaaactttatatgattactgtaaatggaaaaccaatatcattggccaacagggaaggtaatgattaaaacatgcaaacagtgttattaaattctatctagattcacttgtttgctgaaggctctaatgttgagtcatgccctctttttgttaaaaaggatgattagcaaatggtggagaggttgcaaaggctgattctctcattgatttaatcagaatgattagaaggaaaccgacatgatacttttcctaccatatgaatctgtgggtactgcctacaatctgacggtcccactcttgggttcatcttgatccacagaattgtgttattccaaggaggctctgaccacaggtgcaacatgatctcatccaactgcacctacttttcctacgtctctctgctgcaatggtgctggcagatcactgcagaccaatgtaggttgtgtagttgccatccccatttaaagctctcacttgtactggtgccaaggatgatgacctatttagataagtgtgacctgaataaaagttgatctatgatcccgtgttcttgatcagcacagagtttatttttgatgacaggagaaagcataggctataaacatttcctatcacactccaaactcattttctactgtagaaaatgagaaatagacagtacttcccttttccttttctattatatcacatgttccctaaacgtcttctaggcactggacattgaaatatacaacttggctgcttacttatttccaggagtctgactgtttctatttggcatggagtaagtctgggctgccgtgcactgaaaagggcttgggaaatgatatggatttgggttggcaagaggcaaatggcctggcttagtattgtagtcccttggtattgtagtctctgtgaaaggtacccctggggttgtgcagggcatggtcagtgtggttgcatgtggtggtcttcaagggtaaaggatggatgctgaagtcttctagtggaagcctgtgaatgcctttattgaattcagtttaccaatcatctgttcaaacctctcctaattctcaggagtttttctaggaggtaggggaaagcaaatttggaggaagatgagcccttggccctcaagaaacttacatcctggtaatatgcaccatgactcatgaagagtatgtgtcaggttcaaatcttagctgtgccacctattaacagtgtgacactggacaagctacttaacctttctgggccccagtcgttacttacttaaaggacaacatagaggacctttgtgaaaattaaatgataaaatgatgcctcgcacagagtgagtgcacgataaacattaactcttattattgctgagagaacaactttgaagtgaaaagagaaatccctccaaggtgtctgatactccagtcactaacagtgtcatacagattgtaaacccaatgctaaaggagttcaaatcaaggaaaatgtcaccaaggactggtgatagggaaacatatgtcagaatgtccctacatttctagcatgcttcgtttctccctcagtttgtaaaattatattccatttatggttccagaaaacataaacaggattcatgactagaagaagaaaaattggaaggatactagtgtgtccttctcgctgaattatttattgttgtgtgctgaggaacagaatgattgcttcttgccccactgtagatggattgaatttctttctgtccccatgcagtcaggcaagcttattttaataagaacaacttaatattgtaactatacagtgaagttctcttgtccctctaggacacaccacactgtacactctgagcttggaaggctgttctgattatttcgggtgtggaaactgagttaccctccctaggatggtttctgtgaatgtcttagaattgacaagtaaattcaatcagcattttcttttctttttttcttgttttgtgtttgtcaagtgccagataccatgctagacaccttcagggctatgattacattgaatcctcaaaataatctcatgagctaggctttcttattataagcatatttaagaggtaagaaagttggagagaggttaagtaacttgtccagggtcgccaaggtagcatgtgttagcaaacaagatttcagtccagattctctcaccccctacccatttctagcaatgcagtgctgctggagacagcacttgttggcagctacctgtctgctttcctcctcttcttctcctcctcttccctctttctctcttcccttcccttgcttcctcttcagtcccttctcttcctttccttccttctttctctctttccttccttttctccctccctcccttccttcttcccttccttccttcattcctttttctctccctctttccttccttccttttttgtaattttatttttctgcagaatactgtttctcagtggttaatgacaggtacagaataaagtaacagtgacattggataaaactaatgaaatcatcaaatttgcactttttttttttgagaccgagttttgctcttgtcatccccgaggctggagtgcagtagcgagatcttggctcactgcaacctccacctcctgggttcaggtgattctcctgcctcagcctcccaagtagctggtgctacaggcgcccaccaccatacctggctaatttttctatttttagtagagacaaggtttcaccgtgttggccaggctggtctcaaactcctgacctcaggtgatctgctcgcctcagcctcccaaagtgctgggattacaggcgtgagccaccgtgtctggcctgcactcttaattatttaactaaatggggataaaaggaacttcagtccctatcccgtgctgacgtatggtaggcatcagaatatgctttctagaccttatcccagcaagcactccctggtgctgggtgtcatctgtccccaggacagacagggaagggagtcctagagagtcctgtgacttgcccattggctgcaaagctgcagcaagaggaggacagagcagcctgactccaaatcttatcttcttttggctgcagtattttctgaattagacattagcattagccaaaatttggattataggagataggtatttaaggagaggcttaggggagtttgtccaatggcaaaaatgatcagatacagccttaggatctgatacctggttcctggatctgctatcactggtacctggagctgatccggacaatggagacaatggaaagatcagtgagcacatctcagaccagagccccacactgagttgtgcggcctgatcagtgagagctggtgcagccagcccgccttgttggccgtccacagcagcagcctccctttccactgacctcccatctaccctcatacggataagattctgtttactttccaacctaaatgattgtggttctgggagctgttaagaagccaacatgttccaggctcccatgttaatagcatggggattaaaactaaccaaacaagcatgcatttgacaataaatgaggctattggaagtgagtagtgagtacagaagggagcatgtgtttcttgcttgtttattgaccctggtatgtggggcaagtctctaaacctcggtttgcctctgttgtgctgactataaaatgggagataacagtagcacgtgtcccttaacactcggaggtggtgagaggtcaattacttaatgcctcaaaaatccttcgggctccacggccaggaccagaaattggaagagttttcttcccaaaccttatcagaatcctctcctgttttctgaagctcaaatcttagaggggagttggaagaagactgaaagaagaaaggaaaaaaaggagaatgaaacagaaaggattgggaagacaggaggtagaaggaggcatttttgcattcctttagataaagggaagtacccccaaaaaagatactcttgctttgcaggtgtctgctctggagtcactgctctttggtgagaggtatgtaaattgtgcatgttttttgcatgtgagcccttccatgattgggatgagcaatggactgacttctggaaagctgtgggtcttgggatttgatcctggtgctcccactgcggttctttccctccctgtctcacagagcttccatcttctgtcaggtcatttctggcgagaccttagatacaggaccacacctgaagagtggggcatcttcagcccgctgggaagatgcctaggtacctcagggagaattgggccttgttctacaggcagtttttccctttgagaagaggcagatctcctgtcagagactcctaaagccaaggttcagctctccatggccacccacttttgtccacagctttctactcagcctggcaactgtggggtgaggcagaaaacagagctgggtgctttgccttttctaatcagaggggtatatatatatatatatatatatatatatatatatatttatttatttatttatttattatttttttttttcttcactgtgttacccaggctgaagttcagtggtgtagtcatagctcactgcagctcccaactcctgagctcaagtgatccttctgcctcagactcccatgtagctggggttacagggacacgccactacttggctaatttgttaattttttgcagagacggggtctcgctatgttgcccaggctgatactgaactcctggtctcaagtgaccctcctgcctcaacctcccaaagtgctgggattataggcgtgagccactgcatctgccaacattttttctcttaaccgtttgtcagacagaatcaatagcaattttattacagaccctacgaagtcccatgttttttggtgtccattttaatctatttttacaaaggactccagtcaatccttattttctaatagaataccagacaacacagtgagaccacctggacactttcctcaccacgattttaccagggtgctaaatagcttttgtatgatgaaattttggcaaaataattttatgtctctattatttatgtcatatgaaagttggagttttctggtggccatattttttcttataacctagaacatttctttttctttcttttttttttttgagacagagtctcactctgtcacccaggctggggtgcagtggtgtaatcttggctcactggaaccttcacctcccaggtccaagtgattctcatgcctcagcctcctgagaagctgggactacaggcatgcaccactatgcctggctaattttttatattcttagtagagatggggttttgccatgttggccaggctggtctcgaactcctgacatcaggtgatccacctgcctcggcctccaaaagtgctgtgattacaggtgtgagccactgtgcctggcctagaacattccttatgtgtccctctctgcttccacaagcccacactaaatgggcaagatggggagcagtgtgtgggggtggtggggatggagacttcgatggtgctgacctactagaacattcctaggttcccattataaacttgaaatagggcttctttctgagagacacaaagtaaatttttctccctggcagaaggatagatttattaagctgctgctttttattaaagtaacatagaaactttaaaatcctgccatggtgtcaaggactgggctcgcaggatccctggcaggagaaggtctccacctcatctgaagcatgagggtaagtgctggccaagagcatctgtatgttaaggttgccagagaaagcagcaattgacctctggtgtttgttttgcaaccaacaaagggcaagaggaaacttttctgaaatgtttgcttcagggtgtgatgatgaaaccactgttggcttctcttagaaaacctgttcaatctgagagcagaaaaatctttccttttgattataaaaaagagggaagactttgataatgtcaaatatgggcaaggtggtggctttctgcgtcctccctggtaggacatggcagctctgctggcagggatggtgatgcctttcctgactaccaattaaaccagcccttctccagcagcctggccaggtgaagaggggacctggggcagcagagatcagctctgacagtggaggacgtgcaccagacagggctctcatcccaaacaggcttgatacatttctttcccagaaaagattgaattagaagagaatgttttaaggtgagttaggaaaaagcattttaatgataaccgaagaagatagattaaggctaaattaaatcaccaagattggttaaggaagtgaaaaaagagccaaattatacctagatgtgtatcatttcctgagttactttgcatttcggtctactcttttctcttctcttctcttttcttctcttctcttctcttttcttttcttttgagacagagtcttgctctgtcgcccaggctagagtgcagtggcacgatctcgactcactgcaatcttcacttcccaggttcaagggattctcatgtctcagcctcctgagtagctggcattacaagcgcctgcctccacacctggctaatttttgtattgttagtagagacaggtttttcccatattggccaggctggtctcaaactcttgacctcaggtgatccaccctcctcggccttccaaagttctgggattacaggtgtgagtcaccgtgcccagcctcctttttcccttttttgagacagggtctcactttgtggcccaggctggagtgcagtagcatgaacacggctcactgcagcttcaacctcctgggttcaagcgattctcctgcctcagcctcccaagtagctgggactagaggtgcatggcatcaccccctgttaatttttgtattttttgtagagacctcccaaagtgctgaggttacaggtgtgagccattgcacctggcctcaatctccttttaaaacatgatgttcttttctttctttctttctttctttctttctttctttctttctttctttctttctttctttctctctctctctctctctctctctttctttctctctctctctctctctctctctccttctctctttctttctttctttctttctttctttctttctttctttctttctttctttctttctttctttctttctttctttctttctttctttctttctttctttctttctttctttctttctttctttctttctttctttctttctttctttctttctttctttctttctttctttctttctttctttctttctttctttctttctttctttctttctttttgtagcgataagttcttgccatgttgcccaggctggtctcaaagtcctggcctcaaacaatctctccacctcagcctcccaaagtgctgggattacaggtgtgagccacaacgcctggctgaaaacatggtactcttcagcatggttgcattgaacagccttagtcctagatgagaagcaggattcctgagtggaagagtatattggtattttcatgtcaggtgaaacacagctaaaggaacgcttctcatcagattatggggtaacctgattgcaggtgtctaaggggattaaacagctccttaaattccaaaccgtcactgatgattagacagtagggtcccaaacctggtgcttgagtttatcaccctgccgaagatggataggacatctcgaataagacagccataaagtactggggcaatttctcaaagctgcagctgggccctctccctctgacctgtggataccagagagtcttggccagctctgcagagctgtcccagcctgggtgggttttaaatgatgtggggtgagtggaggtaggcacgattccctggaaatgcttctcaagttggtgtgcagtatgagtgccgagtgccaagtaccaaagaaggaaggggaaaataattagaaatggggcattttcccacatgtttccagggagctttgctgttttcaccttgggacgtaggttaatgcagttttccaaccagctgcacagcgcaacccaaacctggcctttgaagtacccagtgcttatatagacaatagacaatgcaactcgggaaatacctcgaggtattagacttcatttaggaaaaaaattgagagaacatctaactatctctgaagtgttgatatggaaatcccagcgtaatgttctattacttttttttccctgattcctatttggatagactccaatgacatgcagaaaaagtacagtcctactttatattcattagagactcgaggagcccagaagacaaatagtccctgtggagggaccatgtctttagggtggcccactggattgaggtcaattgtcacaaaagagaccagaaaggcagaatgagctgctttgcttttgaaagtaaagcaaattactctgttgccttgtattaacatatacctctgtgggttcctaagtattcttgtttctgggtgtatctgtatgtatttgtgattctatgcctacctctttaacttaggaaaatagcaaatgcaacttgagatagaaagtccccaaatcttgggttctgtttctagctcttactgacttcatggaatgaccttgtgctggacattgacacatgctgtttgcctgctgctccagtatgttatgagaaaaggctaataaagtataatcacaacgtcctaaaaatgtcaagtccatgccccttgggcctcccataactattctcatctgcaaaatggacctggtaactctgcgccctgccttccccacacagatgttaggaagctgggctgcagaacatctgtaaagcagttttagattttggaacatgggaacaataaatgaccataacagctatttatcatgaaagaggagatgacgatatattctatatttcaagccccacttctctcatctacttgaaaatagttttgctcacgattgaggccatcagttaaggaggtataagtgtacaaaatgcagagtaagggaggaaattttgacttaaaactttgccaccctgggtgaaaattaactctctgaaaggatgtggaagtgtatattcatgagctgaacgtatcactgtagcttataaagaagaagagaatgctattgagtctgatgcagaataaagtggggaatggcaggtgccaagaatcagggactctaacttggccagaacccgagtcagttgaactgggttactgtttggggacctttgcggaccttagtagggtggggatgacttagcaggcaacgtcttcagaagcagaaaattatgtcctagtaaacatcacaaaattcagcaaagtttaaatcctagaggatcatggacaatatctttgtagaccaactggctggtctttgaccaagcatgtgtgtatatatgtatgtgtatatatgtgtgtatatatgtatatatgtatgtatatatgcatgtgtgggtgtccatccaagaagaagcaaaacaattgctttcaaagataagtaaacaacatttggggatagcccatgctgaaagtggttaaatcaatcatcccatccttccggagtctatggtctcatttatttagtcctcaaatatatgcaaagtaaaaatacttatatttaatatagtcaagtcagtgctttgtttgcatccaaggcactaagatgaaaatggtctctgtcctctaggagcttgcaacttagtaggggatttaagacttttccataattagttaatttctccaattaaattaaaatcctctcctgtctctttccctacccactaactttgtcagaagtccaatatcaccatcttacggctctcttgctccatcctcagaaccatctaaagaaaactcctccaaggctgggtgcagtggctcatgcctgtagtcccagtgctttgggaggctgaggcaggaggatcacttgaggccaggagtttgacatcagcctgggtaacacagtgagatcctgtctctacaaaattaaaaaaaaaataggtctgtggcagcacatgcctatagtcctagctactggggaggctaaggctggaggctcgtttgagcccaggagttgtaggctgcaatgagctataattgcaccactgccctccagcctaggtaacagtgagatcctgtctctaaaaataataaataactatataaataaagtgaataaaacccctctaataaaggagatccttgtgatccctcctgcaaacaggtaagagaccgggtctgtccttgggctgcccctgcccctgccgttgtccctcactgccacacggtgccactgttgaatgggcatagtggcttttttcaggcaggtaagtcccagctgattccacttcctaaattatcccctgttctcattgggtttctagacgacagccctcagtgcccagccatttgggttctatacagtcctcctcctcaccttggggagctgtgccaggaaggttcaggagtcagccccctgccaggctcatggatgctgcctttcaacccgagaaatgccagcgtttctcaccagtcactccacccacttcctgcctcccttaaataaactcctttcctcaaaggtgttcctagccaccagaaacacaaaacaatggcttcccttcacttgaaggaaagccttctctatcacagggatgagtcaccttccaaagaatgcgcagggataatcaccaggacccctcttgctaactcggtaaaaaacaaacacaggttcggtttccagcatgactctccgctaagcatataaagaaatagtttaaactgggcagaatgcaatagctgatgggagaattgcaaagaaagagtgatgggaacacagattagcgaacattgatgtcaatttggagtaatctgggaagaccagattggggaggcatttgtgctgacctttgatatgcaataggatttgacagatgaatgtggtaggaaagggtatttgcaacccaaggaggtaagacaaacgaatgcacagaggtgggcaaaacgcgtgtcatatttgatgcccaggggtgggtggtggtagtggaagtggggaactttgtgtgttatagtgtgggggccatgtggggagatatggaagttgaagtctggggcttagaatgccctggaagacaactaaagatctggcctgttttccttttatgttactgtatctgctgatcagctcaaatcgagaataaacaaatcaaggaatgaacacagaagctaaaagttgaaaacaaaggttgaaattgagttgctttaatgtagccaaatcctacatttttattaaaaaaaaattctcaaagaaaaaaagctgaacttgtagatttcagtaaggtgaaatagaatgtttggagaatttcaataaaacactgaattaataagtcttattttccccacgatttcaaaccatttttgagttgtgtaaacagtcaatacttcactgttatgtccttgaactgagtccttttagtgttcagaaagagacatttagaagaaaatgacacaaaaatttcttcctcaaaccaccttgttgaagtttctccagggaccaaagtcgatgatttgtaaattcctttactcttaaaataaaaggcattttcataaaagaaaaggtgatggccaaagacagaaaccattatgcacaccgtcacctattcaggagggaaaatagtcacagggaagatgtcatttattctcttcctcacggtgctcgactgtcttacattcaaaaacattctatgaagacaaggacatccataagtaacaataaaagcccttttgcagctgttttaaagagttgtaggagttgaggatctcacagtgttaataggaccatcttatgctttagtcaggaggctttcttacccggcatctcgtttgcttccctggtagcagtcccagggaaggtggtaggacaatgactcttaattttgattttatagctgacaaaaccaagcccttcagcagcgacaggactgaaccagtgtttctcagtgagtcgacgcagggccagaaaagatttggagaccagatctcttcaagctcacctgggcatattctcgccctgctgctcccagctgtcccaccagactgttgccctgcgggactgaaaaatttcttgagggtgggaattgcatcttaaccatctttttatccttccacagtaccctccccataacaggtgttccataaatgttaattaaataagggctgtaagtcctggagtctaaatggctctaaattagattttcaaagctttctgggtccttgcatatttctagaaaaaagaaaaaagaaaaactttcactttcttaatctggcagtgaagaaagagaatattagttggcttcattccctgggatattcagaaacaaatattgaggactactggaagctgagggttacgtgcaggataaacagcaataatgaatggatctagaatacaattcagtctcttgtttatatatgtctgttccttctggctcaagggttttaaaatgacctttcctagcaagatctggaaatgaatagtcttttctttttttcaagcagttcttgtatttcctgaagtcagttaccatgtgtcctctgacaaatgagttgcaggagtgttgaccttaccttgaagaatactttctcctgtattttttactttcaccgtatgaccactttttactcctgcagagttggatgcaaataagacccatcccctaagtaattgtgaagtgggcagttttttttcaatatatatgtttcttttctttgcatgattgtgggaaaggggagaggggacttggagaggaagaagcttgtcctgaagatgaggtcagctatgtctgggcagcaggaccccaggaggctgggcttgggtcagcaacagcaaggggctgtgtgagactctaattagcatccccttgtctggctaccctagacatccatctactgccatagctttaaaccagctatcaccaagggttctacccgttccatattcattcatttattgtttaatagaacgtatcatgcacataatataaaatttggaaagagcagaaagaagaaaacatttatgcaagcctcactcaccccaagcaactgtctgtaaacacttttagttctcaggtttttttctaggcatggatactgagagatttcatacgtggcaatcataccgtgtaagtaattgagtaaattgctgttagatgcctgtatctgttgagaagagttgcaaacaagataaagaaataaagtcctttctctccatgctcttaatgcataaatctggttgcctgtcttggaataggttcataggaaggatgttacgggttcaaagggtatattttagaggagagataaatttaagtgagggtgagggtgcagggaagtgtttccttttgagccacctccccttcatttagtttatcagttatttcgcccatgcatggtttcaggcaaccacctcacagtaacacctttggagagccttgaggtgcataacccggagcagtggctggaacgggtggctcagccagaggagctccacacctgcagatctggattggagtcactcaccctggaaattcagcttgccttcgtgagagccactcgggagtgcttatgagccgagctgagaagggcccgggccaccctgactggtggaggtttgattgggagattttaaatatctaaccttgagagctcctgcctataaagacatcgagcgtcactccttctgttactttggtttggtcaccaggagaatctgattccttcaactgcctcacaccataatcaatggatgacttggttattctgtttgtccttattcttatgaagcctagagactcatggggaagccattcctgaaacaatggcaagcaaataaatagatttttctaagctgttatcacagttcaggtgttagggagaaaatgtccagggtgccacaaaaacatataatcgggaaactccagtggatctgaggtggagtgggcgcgaaaggtttccccagtgccattaccactgagctatattctgaagaatgacgagcagctcataggccaaggtggtgtggagaagggggtgtagagatggtttcagcagatcaaacagtagctgtgcaagccaaattgcaaagaagcagttgttatcactactggccaccaaagagaagttggcttcatctggaagcagaggatgtgcctgggaagcagggtggccaacttgtccctgttttcagattgaaaatcccacatcatgggcaccttcctcagccccatgcaaactgggaagttggtcatcttaaaagtaccctctgattcattttaatgaattggctttctgagtgtcaagggttgtttggttagacattgtcctgctctgtcaatggacctctcttagaatgtaaatcctgtgggaagaacatgatgccgttagccacccacttcttagtataaatcagcttatctgaagtctaaattacttacaagttagactctggcctatgaggatgcactgagatgtggaagggaacgggaacatggaagaagatgtttttaacatagagaggaagaaaataagagagcgatgaagacatgcttgacttgcatcattattttacctgtgagtaggttaccttaggcctatactcactatgcctcaactcttatctataagatgagagtaataaagttcttgttcaagtaagaaatgacataggtggtaggcctgtggaacttgtggtcaatgctacatgacagcaggaacctttgttttctgttctcagctccagggaaaacctctcctcaaagtagccttgggatccgtttgtgagatgcaagtcactgttgaaaacagtgacaatgagggtcttcctgcattttcaaaaacctgtggacttttctcaaattcagcttcaaggagtagagagtatgagggcctatacttgtacggggctcataaagcaatttcattcacgttatcttcttagaacgttatacaaatccgaggaaaaattccatcagccaatacttaccaacatttgctctgtgacaagttccattctaggtgctttacttgaaccaggtaatttaatcctcacaataacctgatgaggtaggtactattaccaacccattttacatatgagcaagctaaggccggaaagcccaagtaatgtgcgcaaggtcacacagttattaaatgtggcagccaggagttgaatccaatcacaatggtgctggaaccatctacaactgggaggaggtattgttaccacttctattttacagcagaggaacccctgcatacctggggcccatcaggaaaccctgactgttacagaagggccagactcaggcccttacattagaaaaggactcccgttgccctgctgaccctttgcacaggatgacacatgtgccttttgttttctgtaaagctaccaactgccctgtgtaaaggaaatcaatctgaggtcccttggaaggggaaatgtagagggaaggtcctggaatggaaaggagcagaacaggctgtgcatttgcagttggagcatcacagatccacaatgaagagggcaaagtaaggctggccagggctgcacagcagagaggatgtgcctggaaatgggtgacagtgcactcaaggagaagcatggagggaggacatgtcatcacctgtttaattccacttcttgggcttagtttagttgggcatagctccccttcctccccttggctgatcaatgaatgagagaaagagctctgcagcgcattgtgttagcagcaagctcgactccagaactttgaagtccataagcacattgagtgactactcctgagtttgcaggaaatgaggaggggaagagagtgcagaagcaccaattccaagttctttactcttctcaattcttagaagctgtagaacttgaacctgcaaatctagtaggtcagatcctcctacctaacgaatcctctctggcaattccctgaatcagcttggtctctccatcatggtaacgctctccgttgcctttctcaactgagaatttggtgggtgctgagatttggcaatctttaatattagtctaactcaatttaattaaggagataaactttgagacagagaaggaggaatagttgttttgtgatgaattctataatatattatatgtataatatataatatattatatatgatatgtataatatatataatatatataatatattatatatattatatatgatatatatatcatatatgatatatatatgatataatatatataatatattatatatgatatattatatattatatattatattatatcatatatattatatatatgatatattatatcatatattatatatgatatataatatatataatatattatatatgatatataatatatataatatattatatatgatatataatatatataatatattatatatgatatataatatatataatatattatatatgatacatatcatatataatatataatatattatatattatacatatcatatataatatatataaaatatattatatatataatataatataatatgaattccagactatttccatggaaaattagaagttgagtgtgtagccatttagagagtcctgatgaatagaataaatatttggttcactttctatggttatcttctagtttctgacttccactaataacatatatgtaaataaatgaatacctaaaccactgcccactcaggttattcatttgcagactgtgtcttatatcactatgttttcaggtgacttaagtctccctccccccatggagttcatttatttgtccaaagtaaactctcagaagcataataaaaggctgtgctccaggtttacagactccaggtcctaaggacttcagagagcatttgattaccaccaagagacgcttcgtaagagcttcccaaatgttctccaggaagaaatgcctcatcatttagggagatgccccattagaacctttgccctttgctcctatcattagcttttcttccttttttgaaaagcagcgaagtgacattttcccacattcctctgcaatgctgtgtacctgcacacaagttggcaagaaggcgagagaggtgggggaaacttaagtggaaacaaatgtgaaggtgactatttgctggtgctgtggaatgaaattccagaaggcagcctggcggtgcatccagggacagcagaatcattgagaaaaagtaccagctctggcactgggataaagaattgtcaggatttccttttctatttttcacccttttgatggacttgtgagtacttttgtttgcgactaagccgttcatttctatctgtgtgcaatgcagtgcaatgtttcaggcactgcgggggaccttgtctgtctcccaccagaagttgtagtataattcagggctttcttttcttttcttttctttttaaatagtattgtgtggtcctgagcagagtgaatagttcagctaataaattcctcagaccctttagcacagaggtgagagctccgttgctcacatgggtccccaagccttgacctgttgagccctttgccacactatagcagagtcttttcatattaatactaatttatcattattccatttaaatgctctttttttttgtctgagagaaagagacagaaaacatctgcatatcgagtaatattagctacagttggtgtctcaagtgagaatcaatctgacagccccatttattatatctgggtaggctttatttcagagactcgtgcatttgaactttccctccgcaagatatgaaagagtctctgatgtattcatagctggctttaaaaacaacattttgaaatacaagagagattgcatctatagataacatttcagttataataagagaggccaaatgttagccagatttaaaccaacagcaacaatacagatatttaaaggtgttgttagttaggaagccttatggttcatgtttacagctgcgttcttttgtttcctgactgtgttgtcagcattcacgtggttgtttttgattcatcatgtctagtgcattgccctcctcaatcattaggctaatagctcaggtcatttttaagagcaatgccatgatccatttccctttgggtagggctggccattgaggttaaaacatgccattgttaagacaaaccaaattaccaccaccactaccaaaacctccaaacagagtttttcccatcaatttgaaaatcagccttttgagacttagtacggtacactggggtagttaaagtaaatgttcaaataattggcctatcagttaactttgctcattgtcagttaattaggacttgaacccttataaatcagaggtgcccatgttagtatatgtgttaatgtgtttctcaggcagcaggatggttagtaactattacttctgtatccctacttgataaaaaaaaacaaggatggctctccctctaactctactgagtcaaatggctctgcaggtgatcttggtggccctgaacctgagacacaattccttcactgaggcctgaaaaccaagcaagtttcatactgggttatttctctttgtcttccctctttacttgtattattttttaaatgagtttcagtactcaacaccaggaaacagaaaataaaacagggctcctgttcaatggactggtagtcagcacgcaattgtttgtgtaaaactgtgaaagtccaatacttttttttttttatgtcaaggtgtcttaacatttcccatgtgagcaatttttttttctgggatggagtcttgctctgttgcccaggctggagtgcagtgatgcgatctcggctcactgcaacctctgcctcctgggttcaagcgattctcctgcctcagcctcccgagtagctgggactacaggcacgtgccaccacatccagctaatttttgtatttttagtagagacggggtttctccatgttggtcaggctagtcttgaactcctgacgtcaggtgatctgctcgccttggcctcccaaagtgctgggattacaggcatgagccaccgcactcgggtatagacttgatttttttttttttttttttttttttttttttttgagataaagtcttgctctgttatccaggctggagtgcagtggtgcagtctctgctcactgttggctccacctcccgggttcacaccattctcctgcctcagcttcctgagtagcaggattacaggtgcccgccaccatgcccagctaattttttgtatttttagtagagatggggtttgaccatgttagccaggatggtctcgatctgctaacctcgtgatccgcctgcctcggcctcccaaagtgctgggattacaggtttgagccactgcatccagcctagacttgatttttaaagcacagtggagctgcagtcctcatgtctctgtgtcaattaaagctaaaatgtgtagaggacatttatgagcatcccaacactcataggtctttgacagttgcaaactaaaatggtgatttttttccccctactcctttgctggtctctgccagactactctgggtcctctatcaccttcccttagctccttcagatttatctactcttgatcaccaactctttcattctttaatttatcatattctgtgcctggaacacatatttttcctcaatccactaccttccttgacttgttatttgaagtcccttcactttgttttattttatttttcacttaaaagacaccagcctacaatacacacacagttcagggtgcctgacaccctagaggagagattcaacacatgtcaagggtgactataaaggcagaatgtgataaatatgagaaagattaaagccaagtgctttgggagtgaaaaggggagagatacccattaaatgaagaatcatctcttttagaaaatgtaatagtttattcttttttttttcaaggtattcaaatgtttttaataatgataatccccttggtcaccgatttctttgtttttattttattttgttttattattatactgtaagttctagggtacatgtgcacaatgtgcaggttagttacacatctatacatgtgccatgttgatgtgctgcacccgttaactcgtcatttacattagttatatctcctaatgctatccctccccctgccccccgccccacaacaggccccagtgtgtgatgttccccaccctgtgtccaagtgttctcattgttcagttcccacctatgagtgagaacatgtggtgtctggtctcctgtccttgtgttagtttgctcagaatgatggtttctagcttcatccatgtccctacaaaggacatgaactcatcctttttatggctgcatagtattccatggtgtgtatgtgccacattttctgaatccagtctatcattgatggacatttgggttggttccaagtctttgctatcgtaaatagtgccacaataaatatacgtgtgcatatgtctttatagcaacatgatttataatcatttgtgtatatgcccagtaatgggatggctgtgtcaaatggtatttctagttctagatccctgaggaatcgccacactgtcttccacaatggttgaactagtttacagtcccaccaatagtgtaaaagtattcctgtttctccacatcctctccagtacctgttctttcctgactttttaatgatcgccattctaactggtgtgagatggtatctcattgtggttttgatttgcatttctctgatggccagtgatgatgagcattttttcatgtgttttctggctgcataaatgtcttcttttgagaagtgtctgttcatatccttcgtccactttttgatggggttgtttgtttttttcttgtaaatttgtttgtgttcattgtagattctggatattagccctttgtcagatgagtaggttgcaaaaatgttctcccattctgtaggttgcctgttcactctgatggtagtttcttctgctgtgcagaagctctttagtttaattagatcccatttgtcaatattggcttttgttgccattgcttttggtgttttagtcatgaagtccttgcacatgcctatggcctgaatggtatttcctagctattcctctagggtttttatggttttaggtctaacatttaattcttaaatccatcttgaattaatttttgtataaggtataaggcagggatccagtttcagctttctacatatggctagccagttttcccagcaccatttattaaatagggaaccctttccccatttcttgtttttgtcaggtttgtcaaagatcagatgtttgtagatgtatggtattatttccgagggctctattctgttccattggtctatatctctgttttggtacaagtaccatgctgttttggttactgtagccttgtagcatagtttgaagtcaggtagcgtgatgcctccagctttgttcttttggcttaggattgtcttggcaatgcaggctcttttttggttccatatgaactttaaagtagttttttccaattctgtgaagaaagtcattggtagcttgatggggatggcagtgaatctataaattaccttgggcagtatggccattttcacaatattaattcttcctatccacgagcatggaatcttcttccatttgtttgtgtcctcttttgttttgttgagcagtggtttgtagttctccttgaagaggtccttcacatcccttgtaagtttgattcctgggtattttattctctttgaagcaattgtgaattggaattcacttatgatttggctctctgtttgcctgttattggtgtatatgaatggttgtgatttttgcacattgattttgtgtcctgagactttgcttaagttgcttattagcttacggagattttggggtgagaagattgggttttctaaatatataatcatgtcatctgcaaacaaggacaatttgactttttcttttcctaattgaataccctttatttctttctcttgcctgattgccctggccagaacttccaacactatgttgaataggagtgatgagagagggcatccctgtcttgtgccagttttcaaaggaatgcttccagtttttgcccattcagtatgatatcggctgtgggtttgtcataaatagctcttattattttgtgatacgtcccatcaatacctagttttttgagagtttttagcatgaagggctgttgaattttgtcaaaggccttttctgcatctattgagataatcatttggtttttgtctttggttctgtttatatgctggattacatttattgatttgcatatgttgaaccagccttgcatcccagggatgaagccaactttatcgtggtggataagctttttgatgtgctgctggattcggtttgccagtattgaggatttttgcatcgatgttcatcagggatattggtctaaaattctctttttttgttgtgtctctgccaggctttggtatcaggatgatgttggcctcagaaagtaaattagggaggattccctctttttctattgattggaatagtttcagaaggaatggtaccagctcctctttgtacctgtggtagaattcaactgtaaatctgcctggtcctggacagtttttggttggtaggctattaattattgcctcaatttcagaacctgttattggtctattcctggtttagttttgggagggtgtatgcatccaggaatttatccatttcttctagattttctagtttatttgcatagaggtgtttatagtattctctgatggtagtttgtatttccgtgggatcggtggtgatatcccctttatcattttttattgcatctatttgattcttctctctcttcttctttattagtcttgctagcagtgtatcaattttgttgatcttttcaaaaaaacagctcctggattcatagattttttgaagggttttttgtgtctctatctccttcagttctgctctgatcttagttatttcttggcttctgctagcttttgaatgtgtttgctcttgcttctctagttcttttcattgtgatgttagggtgtcaattttagacctttcctgctttctcttgtgggcatttagtgctataaatttccctctacacactgctttaaatgtgtcccagagattctggtatgttgtgtctttgttcttgttggtttcaaagaacatctttatttctgccttcatttcgttatgtacccagcagtcattcaggagcgagttgttcagttctatgtagttgagtggttgtgagtgagtttcttaatcctgagttctagtttgattgcactgcggtctgagaaacagtttgttatgatttctgttcttttacatttgctgaggagtgctttacttccaactatgtggtcaattttggaataggtgtgatgtggtgctgagaagaatgtatattctgttgatttggggtggagagttctgtagatgtctattaggtccacttggtgcagagctgagttcaattcctggatatccttgttaactttctgtctcgttgatctgtctaatgttgacagtggggtgttaaacccacacattattattgtgtgggcatctaagtctctttgtaggtctctaaggacttggtttttgaatctgggtgctcctgtattgggtgcatatatatttaggatagttagctctccttgttgaatcaatccctttaccattatgtaatggccttctttgtctctttgttctttgttggtttaaagtctgttttatcagagactaggattgcaacccctgcttttttttttcttttccatttgctttgtagatcttcctccatccctttattttgaaactatgtgtgtctctgcatgtgagatgggtctcctgaatacagcacactgataggtcttgactctttatccaatttgccagtctgtgtcttttaatcggaggatttagcccatttacatttaaggttaatattgttatgtgtgaatttgatcctgtcattatgatgttagctggttattttgctcgttagttgatgcggtttcttcctagcctcaatgatctttacaatttggcatatttttgcagtggctggtactggttgttcctttccatgtttagtgcttccttcaggagctcttttagggcaggcctggtggtgacaaaatctctcagcatttgtttgtctataaaggattttatttctccttcacttatgaaggttaatttggctggatatgaaattctgtgttgaaaattctttcctttaagaatgttgaatattggcccccactctctactggcttgtagagtttctgccaagagatctgctgttagtctgatgagcttctgtttgcaggtaaccaacctttctctctggctgcccttaacattttttcctccatttcaactttggtgaatctgacaattatgtgtcttggagttgctcttctcaaggagtatctttgtggcattctctgtgtttcctgaatttgaatgttggcctgcctcactaggatggggaagttctcctggataatatcctgaagagtgtttgccaacttggttccattctctccatcactttcaggtacatcaatcagacgtagatttggtcttttcacatagtcccatatttcttggagtctttgttcgtttctttttagtcttttttctctaaacttctcttctcgctgcatttcattcatttgatcttcaatcactgataccctttcttccacttgatcaagtcagctattgaagcttgtgcatgcatcacttagttctcgtgccatggttttcagctccataaggtcatttaaggacttctctacactgtttattccagttagccatccgtctaatcttttttcaaggtttttagcttctttgcgatgggtttgaacatcctcctttagctcagagaagtttcttattagtgattgtctgaagctttcttctctcagctgctcaaagtcattctccatccagctttgttccactgctggcgaggagctgcattcctttggaggagaagaggtgccctgatttttagaattttcagcttttctactctggtttctccccatatttgtggttttatcttcctttggtctttgatgatggtgacacccagatggggttttggtgtggatgtcctttctgtttgttagttttccttctaacagtcaggatcctcagctgcaggtctgttggtgtttgctggaggtccactccagaccctgtttgcctgagtgtcaccagcggaggctgcagaacagcaaatattgcagaagggcagatgctgctgcctgatcctttctttggaagctttatctcagtggggcacccagctgtatgaggtgtcagtcggcccctactgggaggtgtctccaagttaggctactcaggggtcagcgatccacttcaggaggcagtctgtctgctcacagatctcaaactccgtgctgggagaaccactgctctcttcaaacctgccagacagggacgtttaagtctgcagaagtttctgctgccttttgtttagctgtgccctgcccccagaggtggagtctacagatgcaggcagacctccttgagctgcagtgggctccacccagttcgagcttatgggctgctttgtttacctactcaagcctcagcaatggcggacacccctccccgagcctcgctgccaccttgcagtttgatctcagactgctgtgctagcagtgagtgaggctccgtgggcatgggcccctctgagccaggtgtgggatataatctcccagtgtgccatttgctaaggccattggaaaagcgcagtattagggtgggagttccccgattttccaggtggtgtctgtcacggcttccctttgctaggaaagggaattccctgacctcttgtgcttcctgggtgaggcaatgccccaccctgctccatgggctgcacccactgtctgacaagccccagtgagatgaacctggtacctcagttggaaatgcagaaatcacccatcttctgcatcactcacactgggagctgcatactggagctgtccctattcggccatcttggaacctctaatagtttattcttactattaaaataacacacatttagagatgcagactaggaagcttcacagagacaagaagttagtaaaaatatgtgggccaaaatatttttgtgagaactctggagactacttgagaagtctaagcaccctgagctacatacaacaggaagggatttcagataaagggttaaggaagttcatagcactttgtatgctcatctgtgctctgcccccatttgacctaatgcaacacaactggaaggaaacttcccatgccagggatcctctctttgaatgaaaacgaaggaaaggaccatgtgtacagcagtctggctagtctgggagctgcctcaagaattggtatccatctcaattggctcagagggctgattgagtttgtgaccttgtttgcaagctgctgaaaacaggttcaataatagtggcacatttgagctgcagttccacaggcaggtgccagagggagcaagagatttcaggcttctgaaaagaagcaaggacaagctgcaatgggaatttcacaggactaaaaagcttatgtacatgcccagagaagacacattctcagagtttgaaagatcctaaaatagactctagctgcgctgatcagtgaagtcttttgcgtgaagccagaccataaagtttatgaaaagtggttgttgttttgaatgtccatgtcttaacagcatcatcagcacaacaaaaatcacaaggcacacaaagaaacaaagatttatggtccaatcagagggccaaaacaaaacttcagaagccaaccctaaagaaatgaaaacatatgggcttgctgacaaagaatttaaaataactgtcataaatatgctcaatgagctaaaagagaatacagatagatgactaaatgaaatccagtaaatgacacatgtataaattgagactatcaacaaagagaaactattttaagaacaccaaacagaaattctggtgctaaaaaccataataagtgacctcagaatatcaccaaaaaggttcaacaacagacttgataacgcagaagaagaaatcactgaacttgaagacaggttatttgaaatcctcaagttagaggaacaaaaagtaaaaagaatgaagaaagtgaagagaacccaaggaacttatggggaagtatcaagcagctcaatatacttattacagaatttccagaaggagaagagaaagaaaaggccagagctcttagctgaagaaataatggccaaatgtctcccaaattgaaggataaaatggacatacaaatttaagaagctcaaagattccaacaaggataaatcccaaaagacccacacctagatataatcaaactgtgaaacatcaaagacaaagagacaatcttgaaaccagcaaaagaaaagcaacccatcacatcaaagagaactttgataagattactagtgaatttctcagcagaaactttgacggctagaggaagtaggatgttatactcagggtgctgaaagaaaaaaggaaaagcaaaaatacactccaataaacctgtcaactgagaatatcgtgtccagcaaactgttctttaaaactaaaaaagaaattaagatttattcaggtgaacaaaaacaaagggagttcattatcactagatctgcttggcaagaaatgctaatgggaagttcctcaaggtgaagggaaaggatggtagacagtagcacaaagccactaaaaaatataaagttctctgataaaggtaaattcatagacatagtaaactttattactgtaattttattgcacaccttcacttttaattattgtatagaatttaaattacaaaacattaaaaaactataaatctatgttaatcggtatacaacctatgaagaggtaatttatgatagcaataacaagtgggagattgagcatgtagtactagagtttttgtatgacattgaaattaatttattagtttaaaatagagtgttataactctaagatgttatatgttattacagtggtaactataaaaaaaatttatagaatatacacaaaaggaaatgagaaggaaatcaaagcatgccaatacagaaaaatcaacaaaacataaaaggaaagcaataagagagaaaaagaacaaaaagctgtaagacatatggaaaacaattaacaaaatggcaatggtaagtccttccatatagacaattactttgaatgtaaatggattaaattccccggtcaaagatatattcgaaaatttggttttaaaaaacaggattcagctgggtatggtggctcacgcctgtaatcctagcactttgggatacgaaggtaggtggatcacttgaagtcaggagtttgagaccagcctggccaacatggcaaaaccccatctctactaaaaattaaaaaattagccaggcatggtggcacatgcctgtaatcctagctactcaagaggttgaggtgggaaaattgcttgaacccaggaggcggaggttgcagtgacccaagatcacagcactgcactccagcctgggcaacagagcaagactctgtctcaataaaaataaataaataagtacaaacaaaacccaggattcatcaatatactgtatatcagaaactcacttttgatttgaggatacatataggttgaaaatgaaaggatggaaaaagtgttgcaaatggtaaccaaaagacaacaggataggctatactaaaatcagaaaacatttactctaagtcaaaaatttttgtttataaatgacaaagaaggacattatgtaaggataaaaagattaattcaccaagaagatataattctaaatatttatgcatgaaacatcagagatcctcagtatatgaagcaaactttgacagaattaaagggagaaacacacagcaacacaataaaagtagatttcaatacccctctttcaataatgaatagaataaccaaacagaaattacctttaaaaatagaagacttgaacaaaagtatagatcacttggacctaaaagacatacagaaaagtctacccaacaataacagaatatacattattttcacgtgcatgtgaaacattctccagaacagatcacatattagatcatggaacaaatcctaacaaattttaaaagattgaaattattcaaagtatattttccaatcacaatggaatgaaactagaaatccatagcagaaggaaaactggaaaatccacaagtatgtggaaattgaacaacacactatttaacaaccaataggtcaaagaggaagtcaaagggaaattgagaaaacactttgagaaaaatgaaaatgaaaaaaatcccatatttaaattgatgggatacagtgaaagcagtgctatgagagaagtatgtagttataagttcatacattaaaaaagaagagagataaaaacttaactatttaactttatacttcaaggaactaggaaaagaagaacaaactaaactatagctactagaaagaagaaaataataaggactagagaagagattagtactattaagtagaaaatagaaaaatagtagataaaaaataaaactaagagttaggtttttgaaaagataaagaaaattgacaaactcttagctaaactaattgaaataaaaagaagactgaattaaataaaatcagaaacaaaagaggggatattacaacaaatgccacagaaatagaaatgatgaaaagagattaattgtatgctaacaaattggataacctagaagaaatgtatacaatccaacacaacctaccaagactgaatcatgagaaataggaaatatgaatagatcaataaccagtaaggagattaaatcagtaattaaaaagttcttaacaaagagaagtataggaccatagagcttcgctggagaattctaccaaatatttaaagcagaattaacaccaatccatgtcaagctcttccaaaaaattgaagaggagggaatatatccaaggtcattttacaaggccagcattacctcaatatcaaagccagacaagaacactaaaagaaaagaaaactacataccaatactgatgaatagtgatgaaaaatcctcaacaaaatactagcaaactgaattcagcagcacattgaaaagattatccaccatgacaaagtggaatttattcctgggatggaaggatgattcaacatatgaaactcaattaatgtaaacttcatgttaacagaatgaaggacaaaaatcacatgatcatctcaattgatgcagaaaagcatttgataagattcaataccacttcatcattaaaaacacttaacaaagtaggaatagaaggaagctttcacagcataataaaagccatatataacaaatccacagctaacatcatactcaacggtgaaagactaacacttttcctctaagatcaagaaaaaggcaggttgcctgttctttgctgcttctattcaacatagtattggaaatcctagccagagcagttaggcaagaaaaataaattaaaagcatcaaataggaaaaaaaccctacaattatctctcctcacaaacctatgatcttatatgtagaaaaccctagagattccatgaaaagctattagaactaataaatttagcaaagttgtgggatacaaaatcaatacatatttctatacacttacaatgaagaattacaaaattaagaaaacaatttgatttacaatagcatcaaaacaaatataattcttagcaataagtctaaccaaggaggtgaaaaattcatatactgaaaactataagccattgccaaaagaaatttaataagatacaaataaatagaaagatatcccatatttatggattggaagactatatttatgagatgtaaatgctaccaaagtgatttacagtttaaccacaatacctatcaaaatctcaacagcatattttgcagaaataagaaaaatcctaaaatttatgtggaatttcaagggacttcaagtagccaaacatttttttgaaaaagaagaacaaattataaatggaggacccacactttctgaattcaaagcatataacaaagctacagtgatcaaacaatgtggtactggcataaagacagatagaccaatggaatagaatagggagtctagaaataaatgctcacatatatggtcaaataatttttgaaaaaggtgccaagaccactcattgggagaaaagacagtctcttcaacaaatggtgttgagaaaacagtatatctacatgtaaaagaataaaactggattcttaaatcatacacaaaatattaactcgaaatagattaaggacctaaaagtaagatccaaagttataaaactcctagaagttatcatagggttaaagattcatgacatgggatttggcaatgatttcttggctatcataccaaaaccacaggcaaaaaagcaaaaatagcttaactatttaactttatacttcaaggaactaggaaaagaagaacaaactaaactatagctactagaaagaagaaaataataaggactagagaagagattagtactattaagtagaaaatagaaaaatagtagataaaaaataaaactaagagttaggtttttgaaaagataaaaaaaatattcccgggaaagaaagaactcgatattggggaccactggtaatatctaccacatgttgtttataaggggaataggaagtatcatatctgaaaaatttattctttgttcttatagggcggagtgtgtatgtgtgtgtgtgtgtgtgtgtgtgtgtgtgtgcaggaaattgagaatagggaagacaaggctgtatattttccccatttggcagtaggacccgaaaaggactcgatgaaaaagctaaaagctacttgatctcaagtactccatgaggtgttttcttgttgactaaatcaaactttgtcgaaatttagtgttaactatcaatgggctacatggtccagacaactccattgttaatcatctggaggaggaaggaggtaagccttgggctgggggtgggagatctgtatctttccactggaccaggagtgattgaactgggaatttggatagggggacatttgaagaaggtctggcccttataacatggcagtaggtcagaagaaaatgagaaaaaggtgttcaggtcctggagaagatcccgtgaaaaccagagcccacaactagaagcagtgacaggtaacaaccagttttaaggcttactttttgtgttctaattttcttctgtgatgttctgataacactgcaaccaggcttgtttgtgcttctaggatttaaggaagggttctgactccatgcagcaggctaaatttagagaggcagtggcagaagtcaggaaaaataaaaagactacagtgacgacagggtaaatttctccaatttttgcagaaattatgtgcggagggggctgggtatggtggctcactcctgtaatcccagcattttgggaggccgaggcgggcagatcacgaggtccggaaatcgagaccatcctgactaacacagtgaaaccctgtctctaataaaaatacaaaaaattagccgggtgtggtggcgggcacctgtagtcccagctactggggaggctgaggcaggagaatggtgtgaacctgggaggcggagcttgcagtgagctgagaccgtgccactgcactccagcctgggcgacagagcgagactccatctcaaatcaatcaatcaatcaatctgtcaataatttatatggggagggtacttgtaagaagaatggaattcccagtccagggaatggagttctgctgtgttgtgacttggcatcatgtgacgggaaatccatgaagactggggaatgtgtggatatctgggtcacacttaggtctttaaaaaggcagaagttagacatctttaccagctgagaaaaatggatatgaaaatgcttccatttcaagagatgggggtctcagctatgttgcccaggctggtctcaaactcctggcctcaagtgatcctcttgcctcagcctcccaaagtgatggccagaattttgtattggcttttaaaaaatatcatacatttctaccagtgactatctcacatatgcatcgaaccactcagtatcataattggtaaagttttctggcacttcagtaacaaaacaacacttactttgcactgagcacctactatgtgccagttactctacacacattagcctatgtgccagttactctatacacattagcttgactcttaaccgccatgtctgatacatgttattattccagtttttattccatcttattccatatttttttccagttattcctgtttcacttataatgaaagttaaattaagccaaattaagtaaaattttcaggttctcacagtgagtttgcagcacaactgcgatttgaacatacatctcctggcctccaaagtctacagtcttcccataaatattagacttccgtcttctgcccctacctcaggggctcatctggacaacaggatggtctctactaaaaagggactcagcaatgttaacttgttatcatcagcaaaagcatcattagtcccacaaagccgtatgcaagcactcacagctgagtgggctaacacagtggctgtatttttctgctttattgctataacaaactatcagacagccttagtggcttaaatggcacaaatttactatctgtattacagtctgtagaccagaagtctggccctgatctcactgcattaaaatgaaggtgttgttggagctgtgttccttctggaataagagtgagtttattcccttcccttttccagcttctagaggcctcctgcatcccttggctcatggccccttcaccattttcagaactagcaatggcagattgcatcctcacattgcatcattctgatctgttctgtagttacatctccctctctgaccttctcttctgcctccatttttcagttttaaagacccctgtgatgacctttgacctaccgagataatctaggataatctctttattttaagtcagcattaggaatctttatcccatccgctgccttaatgcccctttgccatgtagcctaacatagttacaggttctggggatcagcacatgaacatcattggggaccatggttctgcccactacagtggattactgattcatattcaaagttagattggatctagaatgtggtcctgatttagatatagaatgtggtcctgatccccttaaggattgctgtgtgtttgtttcattttccccctgtgcttcactctttatgctttcaatcaatctggtggtgagaggtgactaactgaaaaaatggtagatggtttcaaggtggttcaataccaaaagcaaacaaaaagaccatggttatcttacatgaaggcagtataatgtgaaggctgactgtgggctttggaagcagggtacctgagttccagcccctgctctcctgctcatcatgcacaatcttgggtaagctatttatcctccctttatgtcagtttcttcatctgcaaatggcaataataaagatagtacccaaactgttatgagaactaaacaagttaattctgggcacataatgagcactcagtaagtgttacctgttactaaagagatatgcctggttattagcaaaaagaattgaaggttaaaattcagggattcacatttgtttgagatgagaggccaagtatggcaagacaaaaattatagaaaggctccaggagtcctacacagagatgtctgggcttgaattgtgtcaaagcagctgtgggctggagggcttcatcataaagagtgctatggtttgaatatggtttgcttgttcccaccaaagctcatgtgaaatgttatctccaatgtgatggtgttgagatgtggcctagtggaaggtatttggggcataggcacagatctgtcatgaatggcttggtgttgttagtgcagtagtgagttcttgttctggcaagatttgattaattccctcaagagtgggttgttataaagccaggatgccccttggattttcgtctcttcacacatgtctgcttcccctttgaccttccccaccatatgatgacacagcatggaagcccttaacaaaagccagggccatgccctggaaattcccagcctgcagaactgtgagtaaaataaatctcttttctttataaattatctggattcaggtattctgctacagcatcacaaaacagactaagagcgtgggcttcctggtctggcattcatgaccactcataggccccctccattcatctttccatctctgtctcacttctctctcttgtaggaaatcagttgaatgtacctgggctttcccagttctgaatctttgctcaagtggttctctcccatgactacctcctcccatatctgcctgttgagaaatctcaaagaacatctccatgaagcctttatgaagtctccagccgtgaaaggactttcactcttctgaattcctatagcatctcgtctgcacagctcttatattatggttaattgtctctgtgtcttttcttctttactaagagacaggctgcgtaatgtccttatccacttccgcatctttctcagcacatgcttaggaaagttgcattgaataaatcgttggcaaatgagggagtgagagtgtgccacctccaaaacaggatgtctgcttgcttctttggtgaggaattaggtcatggtattcatagtgttctacatctttgaagttacccttctctgattacacacacctcccttgctctgctactggtccccaacccaatgcatatcagaaatcttttctgaaacatgaaaagtatacagatgtcctggagctatccccaagattccaattcagtaagtttgaggtggggcccagacatatgtatttgtttttaagcttcagagttgattctaaaggatgtgcagaaaaagtaacttctttttttttttttttttttttttgagacaggatctggctctgtcccccagtctggagtgtagtggcgtgatcccggctcactgcaacctccacctcctggggtcaagtcttcctcctacttcagcctccagagtagctgggactacaggcatacgccatcatgcttggctagtgttttgaattttttgtacagacagggttttgccatgttgcctaggctggtcttaaacccctgagctcaagcgatctacctgcctcagcctcccaaagtactgggattacaggcatgaaccactgtgtccagccagcaaaggtcattattgataactggcattgcaaagaattccagatattgcttaatggatgattcctgaaaaataatcagaaaaaaaaatctatcacttctctattcttattgccaaaacataccacagccatattttcaggggagatgtcatagatgtcagtccatacataaatgatgaggttgaaatttgggcaaaatgagttcatcaggataagaaattagcacgtatgtggcaataatggattgggggaagaggtgggaaggtaacagggagacactttgtttttgccaacataagaaaaaaagccttgagttttcttgtatttcaagagttttcatatatatatatgtgtgtgtgtgtatataatgtgtgtgtgtgtatatgtgtatatacacacctttggtatagggagaaccaagagaagcatcaagtcatgggaggtaaaatacacacacacacacacacacacacacacacacactcctaagctacaaagccaaatgtgaaacacggtaagtccacatgggctcaagtgagaaatttgcttcgggataacaattcagccagaaagtaaaccagataaaatacccagaggtagataaagaaaaggacagggaaactctgtgttgtacttgcaatctaaaaggtaagatttttctcaatgttccatcctgaatcggctttaccctactgaataaagtcttgaaggctgaactgtgggtaagtttgtgtgttacacattagctaaagggaccccattatccacgagtcaggagctcagctaggcggaaactgtgggtaagaaaacaaaggcagtgtgaaaaaaatggctgagggggctcagaagttgggactgtttttatttgtttgtttttcttaacgccatggtattttagtcttgttttgttttcttgatcaaatgtgtagtttcatactgttgtggaatagagccatgacttttattttgcaattatatagtttcatttcccttatatttacgaaaactacaaattaattttttctttgtgatgctgatgtattcattgggttgttacaagagcacaggatgtcccaatctccacccgtcctatccacttaccccaccggcagctggtttccaggttccttgccctgggtcttaggcttcctctttctttcaaacaaaagcctcctttccctagttctctccttggaatcacagaggctggagcttaaggaacacaagtggcccagcattctcaggttgcaaatgagcaaaatgagaaaacagaggcccagagatgggagtggcttggtttctgtgagaaatgagggtctcccaggagggagccagtgcagtcggccttgctagctgaatgtgtgtggaaacgaaggaagtaatacaggtggcaaagaggtaatggtttagtatctctactctagttttgttttgtttttgtttttttggtttttttttttttttttgagatggagtctcgctcagtcgcccaggctggagtgcagtggcacaatgtcagctcactgcaagctctgccttctgggttcacgccattctcctgcctcagcctcccgaggagctgggactacaggcatgtgccaccatgcctggctaatttttttgtatttttagtagagacggggtttcactatgttagccaggatggtctcgatctcctgaccttgtgatccaccctcctcggcctcccaaagtgctgggattacaggtatgagccactgcgcccggcctagtttttttgaagatctggggaaatggtagcctgtttgagaagccattctgcatccaagaaaaacagacccagaaagccacctgctcatgcatacaaatgctaaaactccaggaaagtgagtgaacagaacacattcacctgcaggcactaaggaaactgatttgagatatagaatcctggaacatttgtgctagaaagaacctcacaagtcgtctactcttattcccttattttacaggtcaagaaactcaatcccaaagatcacaaagctgattagaggagggtcctgatccgacccccgaaagccctctctactgtcctgagtggccaccaagtttgcctttgagaaacatcatgggattgttgtttggatgttgatttatctgtgtccagttctgcttattatgggctggtattaacatttctttttcttcttgtacaccagttgtcatagcattatccacagtagtcaaaatgtggaaataacccaatatccatcaacagatgaacaaaacatggtgtatatatggaatattattcagtgttaaaaaggaaagatggctgggcacagtggctcatgcctgtaatcccagcactttgggaggccaaggcgggtggatcacgagttaaggagttcgaggccagcctggccaacatggtgaaacccccatctctacgaaaaaaatagaaaaattagctgggcatagtggtgcgcacctgtagtcacagctactcaggaggctgaggtaggagaatggcttgaacctgggaggtggaggttgcagtgagccgagattgcaccactgcactccagcctgggagacagagcgagactctgtctcaataaaaaaaaaaaaaaagaaagaaacatactggtacatgctacaacatggatagacctcaaaacatcgtgctaagtgaaataaaccagacataaaggacatatattgaataattccccttacatgaggtacctagaacaggcaaattcatagagatggaaagaacagaggtttctaggggctggaaggaggatggagaggagaattacagttaaatgggtccaaagtttctgtttggggtgataaataaaacaagctctaaaaaggatagtggtaatggttgtacatcaatgtgaatgtacttaacgaattgtatccgtaaaaatattaaattgataaattttaaattgtgcgtatttcactacaatttttaaaactgaaaaaatttttatgcctttctttgttgcaaaccagttgaggctccagtaagctgtggtttgagaaggtaggctagggagctagcctgagttgaatatgtccgcagatcatttaccaattggtaaaacacagacttaagtttttctgtctggctaggcatggtggctcatgccttgtaatttcggctctttgggaggtcaaagcaggattgcttgaggttaagacttcaagaccagcctgggcaacatggcgagacctcgtctctacaaaaaatttaaaaattagctgggtgtggtagcctatgcctgtaatcccaaccactcgggaggctgagatggggagattgcttgagcctcggagttagaggctgcagggagctgtgattgcaccactgcacttcagtctgtgtggcagagtaagaccttgtctccttgtctctccaaaaaaaaacaaaacaagttttcctttctaaggcctaaccctgtctaaaggaagtgtaaccccaaagatcaaataatcgattatcaaaaatacgtggagctcccactctctgccccactgtatatatacaaaagaggagtggggtggcgggatggtaggagtacagactttggggccaggttgtctcagcgtgaatcctggctccagcatatataagctttttgcctcttgagtaaattattttcctctgtgttcaattgcctcatctaaaaccaatgtactattggtactgcattataatttgttataaaggtgaaatgagtaggcatgataaaggactcagaagaccacctggtggcgcgtgagccgttatcattattttgatcacctgttacgagggacgtggtattagcagaggtgtctgcctgctctccagaaacaaacttctttttggtgaaaactaggctaagagtaagaaactattagcaaacatcataaagcagtattgatgagctggagtgataagaacaagcatcacagagcacgtggtacttcatagagttcctccgtgtacccaggtatgtttcatcttttcaacatctcgaaaaagcacattacagattttacttagtggaaaacagagactcagaatcattgccttgctgaaggattcacagcttataagtggtaaagaataagaatcttgggaacttagagacaggagaaaccagtgtggtctaagccactcaaggaaggctttgtgaaaatgtgacttgaaaaatatcttgagtaagatgaagatgagaagaacatcttgggctggtacatggaatggtacatggttcatcttgggctggtacagtgtgaatgaggtgtgtttgtgtgtatgtgtctttagagttgtgcagtgcacaacctgtgtggtcatagagagcagccctgccagcaggggaaaccacatgggcaggaatgagcaaattgtctttgtaatacaggaagaaggccttgtttgactgccacagatgggacatttagtggagtaagaagactggtgtgagaacggggtgttggtgttaatgtttggattacggtcctagatgctgagaattcctacagtggaaggagctttggaataagaaactcgtgatctcacccttgccttggcgcccccatcagctgtgtgaccctgggtaagtcattccaactctctgggcttcaatttgtgcatccatagactgaaaggattcagctgggtggctctctcattgtgttttcatgcctgttaagatgtcaaaaatacttggttatatgactctctttgcttcgtttactgaaaggagaggcttgggaaagggtcctttcccatttttcttttaccctcggaataatagccccttctcaggacgaaggctctctaaagccctattctctgaagtatattagagaaggaagtgtaaacataagatccttttggtatttttattaaaaaataaaaacaaaacccaggatgggatagacttacccttttctcctctgagtaattaacttgtctctcccctacatggggacagcagacccaagtattttatacttctcttatctcatcatttcaagctcagagttttctaccactgttatttcccagtctctctttggaatctataatgataggaattcttccgtgcttactctgtagtctgcacaatgttttgcagcccaaaatagatgcaaaaaagtgtgttccattgactcgtgttgaatcatataggtaaaaaaaccaagatacttgtcaccaccttacatttggggaaaccaaggcaaggaatgggaaagtgacttcactgacgtgcaaaataaaggctaggcatgctaacagagctaaaggtttccatcttaaagtcctcgctgttccccacacgatgatgatgacagttgcatgtgtggggagcgacaaacacgctttgccaggcccaccagatgggcttggaagccaagtcagagagaggcatttcactctccacatgtaatcggcatttaccagcatttgcttacaacaagaaacattaaacagttttccacatttcctctaaatgaatgggactccgcaggaaaaccctaaagggaagtgtctgagaaatcggtggcagaggaatttcactatgaggagagcgagccagttcattctgtttgcttgttaataagttctgtgtcgccagctccagggggaacggcctcttgaatagctggcggggaaacgcattcaagggctctgcttgatgaaaatagggaataacgggaagggagaggaagggaaataacttcagaaaggattggaaagcttgtcctctggaatgaaaacaagctgctgctaatttgactaagttactgctgagtctgggtgcgagctgagcggcagctgagccgtgcaggaagctgcagccctgcttttctggctcctctttgcaatttatatgcagccaatgttacgtctcattctttcagataaggctgcatttagaatccagtgtgtttcaaaagacaagctgcagaggctggggtgtgtgtatgacctggttagagaggtggttgatactgattgtggatcaagaaatagatgagaaatgtttccctatgtgaagcattatctagaagcaatacatggccgtgtcgctctccttaaggaacattcatttgatcatcttgatgcagggcaggtgagccccaaagtggggcttagcccacgaggtttcttggcttcacccaggaaagaatttaagggtgagctagtggtagggtagaagaaaacagttttattcaagtggcagcgttacaagtccatgactgtttcctgcacagcagggctgccccgttggcagtgtgttgacggtagcagctcagggtagttttgcagttatatttatacctacttttagttacatgcagattaaggggcagtacatgcagaaatttttagggaaggggtaataacttttagatgtcaagtcattgccatggaaaggggcagtaactctcagatgttgccatgacaatggtaaactcacatggcacactggtaggtgtgtcttatggaaaaccacttccaccttatccctgttttagctaatcctcaatttggtcaggtgtccgagctctgcctctggagtcaagtcctacctcctgcctcaatctggccaacaaatatttatatctgtgctgtcctgggacgtgaagccaattgagttgtgtacctggttctcaaagacactgatgaagacagaaaataaatagaaaatcatgatacaagatatatgccgttcagggtacagatttgcataggttcttaaggaaggggtacctgtcccaggctgaggaagatggagaaggcagggtatggaaaatctgcctagaggatggggttcctgaaggagaattaggagtgagttagctggttttccttccacaataaaaggtgtgagatttaagtactctgggacccactgaaattgtctgcaaattggtgtgttatgttatgttatgttgtgttatgttacgttatgtacatctgcctttctccggaggggacacataacttatcagattcttagaggcctaagaccttttctatccctaattaatgatttatgttaactgtgcaatacttctgaatattttactgatgtccaaataatagacattctattttcgtttctatgtgtatatatttgcttctatatgtgtggaactatagcaaacatttatgtagttaaatctttgtgcacgtgttttctttttaaattttagaaacgttattgcgtcatcaaagtatgtgaacactttaaaaacctttgggtacatattgtcaaaattccctctccaaatttatacaggcttattaccaacagaggtggagtaccatttccctgaactcttgccaatgctatttgtattgccttttaattaagaaatattttaaatataaattgatacagaaaatagatgcctatgagcttatttacctatatttaatatatatgacaatttgccatagtgtttttcatatcttaataaagaaataaagtgtgtgtgatagggacagcagaagcccactctttccttcccatctcattcatctccttccctcccccaatacccaacattttttccttttctttccttccttttgtagagaaagggtctcacgatgttgcccaggctggtcttgaactcctgggctcaaacaatcctccagctttggcctcccaaagtgctgggattataggagtgtgccactgtgcctggcccccaatatatatgtttttcctaatcactatactaccggggattggcccccaagggtttttaagtggatattttcatacttttaccactcacagatgtctccaacaatatataataatgtacttcttaaaatagctatcatactgagcatagttattgtaattttcttttttctgagacagagtctcttgctctgtcaccaggctggagtgcagtggtgtgatctcggctcactgcaacctctgcctcctaggttcaagtgattctcatgcctcagcctcctgcgtagctgggattacaggcgcccacaccatgcccagctaatttttgtatttttagtagagatggggttttgccatgttggctaggctggtctcgaactccggacctcaagtgatctgcccacgtcagcctcccaaagtgccgggattataggcgtgagctaccgtgcccggctgtaattttctttaaacattgatttttactttcttctaaaatgttttatttgctttgcttttcctttgcttctcccgcctctctctcctaccattccttggactgaacagcttttgttagtccctccttcacctctattggtttagaagttatacagataatttatttctactcttttaggagttatccttaaaatattttaaacagctttattgggatataattttcatactatacagttcacccatgtgatgtgtacaagtcaatggattttaatgtattcacagggtgcggcaaccatcaccacaatttatgttaatatttttatcatccccaaaagaaacctcagagccattatcagtcactccccattctcccttcccctctgcccttggaaaccactaatctattttctgtctctgtggatttgtctattctagacatttcacataaatggaatcattcagtaagtgttgtgactggcttctttcacttaatgtaatgttttcaagattcattgatgtcgtaccatggatccatacttcattactttttatggccaaataataattatatgcataagtcatatccattcatcagctgatgaacatttgggtgtttccactttttgacattatgagtgatgatataaagaacagtcatgtatgagtttttatgtggacatatgttttcaagttctctggatagatacagagaaatgaaattggtagataatgtgataaatcaatagttagcttttaaaggaactgcaaaactgctttccaaagtggctgccccattttacattcccaccaggaatgtatgaagttcctgtttctccacatcctcactaacactgtaatagtctttttttttttttttttttaagaatgatccttgtagatgtgaagtggtatttattgtggtttgactttacatttccctaatgactaatgatgttgagcatcttttcatgtgccttttttttttttttttaatgagacagagtcttgctctgttgccaggctggagtgcagtggcgctatcttggctcactgcaacctctgcctacccggttcaaacgattaccctgcctcagcctcctgagtagctgggactacaggcgtgtaccaccacgtccggctaattttttgtattttagtaaagatggggtttcaccatgttggccaggatggtctcaatctcctgacctcgtgatccgcctgcctcaacctcccaaagtgctgggaccacagacatgagccactgcccccgcccttcatgtgctggttggtcattcctatatcttccttggagaaaggtctactcaggttcttcgactatttgtaagttgggttatttatctttttattacggggttgtaatagttctttatagctttgggatacaggttgcatatcagatatatgatttgtaaatgttttttccccttctatatgttgtgttttgctttcttgatggtatcatttatagcactgaagttttcaattttggtgaagtccaatttctctatttttttttttcctttgtcacttgtgcttttggtgtcatgtctaacccaagttcactaaatttactcctacgttttcttctaagagtttagtagattcagctcataacatttatatctgttgtccatttgaattaatttttgtgtatggtataaggcagggtcaaaattcattttttgccatgtggatgtccaattgttctagcctcgaattagtaacatgcatatgttacttaaggacaacttaggtttttaaaataaacttcagaatgatcaggactcatataccactttaattctgatcatcctgacctctttcatggtattgaggcctagtattttacttctatcctctttttgaggcccccagcattcttaatgacattacacttcatacatatgtgatgttaatacttcctgggtgtctttgctcaccagtgcttttgcttctcactttttccttcttggtttagttggctgcttttttcttttttttcttaagacagtgtctccctttgttgcccaggctggagtgcagtggtacagtcttggctcactgcaacctctgcctccccagctcaagtgatcctcctacctcactacgcaaggtggtggttcaaacccctccgctgaattccagatgaatttattcaactgttcactggatatctccacatgaatgtcttctatgcacctcaaacttgacatgacccaaacagagcttttgagttctgcctacctgctcgtgccacagtctcatcatagtcagtgggaacaccatctttgcaatacttgcccccaaacccaagcatcatggcagattcttttctcatttgtaccccacattccatttcagcaaatcatgttcaaaatacatccagattctaaccactttcactatgtggtggagcctcctgtttatagtctctcatctgtttatcatgaaggccccctaccggtctttctggtctgccttcagctcattctctgcatatctctgagttaaaatataaattagattatgtcattcctttgctcaaaaccctcacacggtttttcatctcacccctggtgaaactaagccccacagtggcctcgcagagccacagtctggcctctgaggtctgcctggtctgtttccctgccatactccctctctcacctcctgacagccacaagggcctccttgctgctcctcaaacccatcaggccggcccttgacttggagcttttacatttgttgttcatcttctcaaaacattcttctccaagatttatttccgcatgatatccttcaggtcttaatcacagattactttgtgcctgccctagcctgcctatttaaaatggcatgctccctaataattcctaccccattccctgctttggttttctccatagcaattaccaccactgactatattatggtaggttttatttttcattcacgattacttattcccttctctgtaggaggattatgcatacgcactcttgccgtgcttgtctctagtgcataccattggcaactttgggtatgtgatttgtttatattaatagaatgtgagcaagcatgacacaggtcgcttctaagcgaaagctttcagtacaacagtatgattggcttgatgtcttgcatttttgccctctgccgctataagagcatgtcccagatggggacttgttcttcagtctgcctcctggaactcacagattagacccatagtcaacccccagcctggagtagagccacagggaacctgcaaccctcatttgacatgaaaaacaattatcattataaatcattgagatgtgaggattgtctggttaccgcagcaaacacttagtaatatatcaaattttacttaaaaaactatctctcttgtctttctctagcaagtggaccatttaaaaaaaagaagaagaaaaacaacaaccacaaaattatctctttcttttagaaagtaaatgctgtgaaagcagggatttttgtcttcattcattgctttctttttcatacctaaaatagtgtggggtacatggtagagcttcataaatatatatggtattaattaatatatgctagaaaattcttagtcattttccctttaaatattgcctctcctctttttctctattgccttttcctggaactcctattagatgtatgttggactttctcattctctcttaaccactcttttatattttccatttctttaaatccccaaattcttcattgtggatatattttttttaggttttattccaatgactatatgttttatttctttaaattctattctactcttttttcaaatgtgcctattttcagaatgtgcttttcttcagtatgtttttttataccatcctttatcattttgacaaattaaaacatatttagtttatgtttttctgttggaagaatattatctgacgttttgggagatggtaactgccacttttttttttttttgagatgggagtctcgctctgttgcccaggctggagtgcagtggcatgatctcagctcactgcaagctccgcctcccgggttcactccattctcctgcctcagcctcctgagtagctggaactacaggtgcccgccaccacaccctgcaattttttgtatttttagtagagatggggtttcaccatgttagccaggatggtctcgatctcctgacttcatgatcctcccgcctcggcctcccaaagtgctgggattacaggcgtgagacaccaccacgcccggctggtaactgccacctttttaaaacttatgactgttgctcacagattattttctcttgtgatttataatatttttggaagctcagccacagtgagcattaaaaaagtattcttgttagagccacatgtgctctttcaaaaaaaatcattggcttgggacttcttttaccaaaaaaaacaaaaacaaaaaacaacaccaaaaaaaaacagtgctaatttgtactttgtgcccgcataaggcatagacttgagttttcaccttcttccagtaggtttttatttccttttttgctccccagaaacctagtcagagataatgacacttttttcttcactgaggtgttaaatggagttttaaagttcactctttactgacagtgcagccttttcagggtccctgggtgaactgcagggtccttcagggtccctacaggagtcatagtatgtgtgaagccccacccttcactcttagctgtgtattctttgagtcctctctctcccagccttccaccatcctcagccctgaggaatcagctttcaagctccttgctttatctttgtcttccagagactgcttagaaagttttttcttgccttgagattaaaaaatctccatctgtactttttctaggttttaaaaaattacttatttttttttacattgaaagttataggtcatgtgaaatttattttggtacatggtgtaaggtagatatctaactttacttttctcccaaatggctaaacagttgtctaaacatatcttattaagtaattcgttgttactctctgttcacctttatcacgaattcttatgcatatggggtgaatttcagagctttctgtttcactttaatggtctgtctgtcattccctgtgctattatcatattcttttaagtagtgtatctttctaatacattttaatattgggaaattcaggccaccttgaagtcctgttttttcttgtctggtagcagatgtttattctttttaacaagctgaagaattattttgttcagctacacaaaacatgtttaagatttgattgaaatgaaacacatttataaattaatttaaaaataatgggcatctttatgacattgagccatctcatgaagaagtatttcctcatatgatatttcttcatatagcatttgttttaaaacttatttttttgtttttttcttttaaatgactttaaaatgctttaagttgtggtaaaatagacataacataaaatttaccatcctaactatttttaagcatatagttcagcagtaaagctcattttcagctcattcatattttaatataacccatgttcaggactcttttcatgttgcaaaaggaaaactctgtactcattgaacaactcctcattcccacttactccagcctctggcagccgccattctactttctatttctgtgaatttgactaccctaggtacttcacataaagtacttttctttatggaattatataaagtatttttctttttgtgactggcttatttcacttaaaatccttaaggttcattcatgttgtagtgtgagtcagaatttctttccttttaaagattgagtaatattctatcatatgtgtatatcacattttgtttatccattcattcatccatgaatgcttatttggctgccaactcggtatcatgaataatactgatataaacttgagtgtaaaaatatctctttgagatcctgatttaaattatttggggtatatatatagaagtagaagtgctggatcacatggtaattctattattatgaatgttttatacagttattagtggaattttctctgcatgatattttgtaattggtccttggtggcataaagaaaaatctattggattttgtgtatttcctgtgttttttattagtggttctcaagcttggatgcatattaaaggcatctggcagcttttaaaacagacatggagccaggcctcagtcaagaacaattatatcagaatttctggggtgagccccaggtattgatagtttttaaaagctttccaggtgattgtaaaatgaagtaaaggttgacaaaggtattagactcaatcattgtttagttgatgcacatggatgttttagacaaataatatcatctgcaaagaatcattttctattcttttctatatttacacctcgttaatgtgttttggacttatcgcattgaccaaaatttcctcaacaatgctaaatacatctttgttttgttcttgattttaaaagaatgcttttgctttaggtatattagatgctgttttcaaagagattttctttttcttactgtgcatttcttgagcaagatataaaagtagggatcatctgaagaggttacattttatccatgcctgtgtcttttgaaattttagtatatattttcctgaagtaagcacagatgatttttcatagaaatcgaattacgaatgtatttcctattcatttcactaacacatttcgtaaaatgtatgttgaattatcaatggatgctgacatttatgacatccttatctgctttgcccaaaagctaccttgaggcatattagtggatatttgctagcattgaaaccatgggttagagctgctttctaatggttatgtgttcttcccctccgcttggacagatgactctctggactgatggagtacatagctgctctgctcctaaaagatacagccaccttgtttatttctacctctgctcctatctaaagagactttttgctggggtttggcctaggctgtgatgtgttactactgtttccccacatttcctgtttagatgtttctgggcattgctatatctgattggttgtaaaacaaatgttgggtgagaacatgtgacagaggggaatagtacctgccgagactaaaaggtggcacctgcaccccaggtttctgggtcttacagcttccgggtctgagtcaggagacaacggtaaggaagggatgacttatcttcctttctcttttctctctttttctctttgttttctttctctcctgtcttcctttctttttaaatgatctccattttatgaagcacagactgagattcatgaggcaataattggccagattttatttaacaaaactctgtttttctgtagattctggggattccttctgggtttggcattatgttgtctggaagattttcttttcctctggtggtttttaatcttttaattgagttgggttttaactttttaaaagttttttaaaatatattttaggccaggcacggtggctcacacctgtaatcccagcactttgggaggccaaggcaggtggatcacgaggtcagaagttcaagatcagcgtggccaagatggtgaaacctggtgtctactaaaaatacaaaaaaaaaaaaaattagctgggcatggtggtgggcacctgtaattccagctactcgggaggctgaggcagagaattgcttaaacccgggaggtggaggatgcagtgagcctagattgcactgctgcactctagccttggtgacagagtgagactccatctcaaaaaaaaaaaaaaaaaaaaaaaggatattttagcgggatgttggaaaagattgaattaaggcttagattcagatactattttaaaccagaagcctaatactattttaatcaggagagtgatgtgcagatctggactaaaatgaagataagagaggaagcctagagaccagtaagggaagctatgatagcacattaaattgttggaggacacttttcttttttttgagacaaggtctcactctgtcacccaggctggagggcagtgacacaatcacagctcactgcagcctcgacctccccaggcttaggtgttcctcccaccttagcctcctgagtagctgggactacaggcatttgccaccacactcagccaattttggtatttttagtagagatgaggttttaccgtgtggcccaggctggtctcaaactcctgggctcaagcaatccacctgccttggcctcccaaaatgctgggattatcgacatgagccaccacacccagcctggaggacatgttaatgcagcataaaataaggtactaatctgaatgtcattggatataaccaatctcatgtaatagaaagatcactgggcttgctatcaaaagcactgagctttagctctaactaacattaaccagctgtgcaaacttgaacaactcttttaacttctttaaatctgaaattaatcacagttaaaccaagatgtcaacatgactggtctaggggatgcccagacagctggtaaacatgctttctggatgtgtccatgagggtgtttccaggagagatttgtatctgaattggtggactgagtagtgtggatctgccttcatcagcgtggatgagagtcatccaactaagggcccagatagaacaaaaaggcagaagagtgaatttcctcgctctctccttgaactggacagttgtcttatcctgcactcagacactggtgctcccagttcttgagccttaagccttagactgagagttacattgctggctcctctagttctcaagccttcagacttagactgaattataccactggtccttaaggttattcctcttgcagttggaagatcatgggacttgacctccataattttgtgagccaattccaataatacataccctcttctgtatctataagacagattttcctggtggttttgtttctctggggaaccctgactaacgcacctacgtgaaaaggtcaagaaagatctatagttcttgagactatctgacatttttggttttgatcattccatatgtaaaaatgaatggtgtgggctctgagtgcagtcgaagattgacttgaagcaggtggagtgtgtgatgggcttggaagaaaatcagatttgaatggagagggcagtgaagcctccaagggcttcctgttgaaggtggggggttgctgttcctggtttgtgtgctaaggttgacacaatgttttgtttctagaagaaggagtaaaaaaaggacatactagaatggatttgtttttattttagtctgatgtattataatctttgtgagtagttgtagtagactgtttttgcactgctatataaacaaaaaacagagactgggtattttataagaaaggtttaattggctcacagttctgcaagctgtacaggaagcatggtgccagcatctgtttgggaggcctcaggaagcttccattcatggcaaaaggtaagggagagcaggcataggacatggcgcaagcaggagcgagagagagagagaaagaaagaatattggatattgggcgggggaggtgccacacacttttaaaccaccctaacctgtgtgaactcagagcaagagctcacttatcatgaaggggctggctcatgccattcatgaggtatccaacctcatgatccaaacacctcccaccaggccccacctccagcattggggattacaattcaacatgagatttgggtgaggacaagatatccaaactatatctttagtatttgcaataattcatcagaattttcttatagaaagcctagcctttacagtggggcagaaccagcactttgcacatattatagtaatgcaagaggggtagatatgactgcatcttgatgaggttaaatgatgtggacaagcctgcatagcttgcaaatagacaaacttcaaagtctacctacatctgtgattccaaagcctgtgagcttctccctgagtagagctgctttagctcgcaggtcccgtaggtgtggttgtgttgttgataatagagccaaggaaatgtgatatgtttgctgggctggtaagaaaccatgccctcctggaggtcagtgactgtgttttatcaactttctaaacccaaagactggcatgattactggaccatatagtagatacgccgtaaatatagttaagtggaattgaattacacacagtaccaagtggggatctgaatgcaccctctctgtctttcttgacgctccatctgaatttgtcctggagtcttggcctgaattttctcccccaggtgcatgtcagggaaggtcacagacttgaaatatttgcttacaagtcaatttggagatcagcaagactgaatctcagcactgagggggatggagagtgatgccttcaggctggggttttgaaaccaaacaattaagttcattaacagtaatgaaacacagggaagacagcagcagcgagagatactcagtataaaatgagcattggctctcccttcaccctcctctctttttcattttcttcctctcaaaatgaaagttgctgacctgtggggctttgtttacccctgtgaactgtgaaactattgcattcttgaataattgtgactaatcatggggaaacagaccttttaaagcagcttggtacaaaaaggcagatctcgcattttgaaaatataaatggatcaatgcagattccaagttccataaccaaatcatgttgtgtgtgtgcacgcaaatcatgtgtgtgtgcacgcgtgtgtttctttctggtgcttggcacaccatggctgcctaaattatgtttgctgtgttgcattaaaaaaaacaaacctcaagctgctgtttgaactgacccctttgttgacgctccctttctgttccctgtggtcagcttggggttagcttggcatgatggagggacctgcaaaaggcaccccatgtttctcaaccaaaacaggcccatggaggtgcacaagcaaagcaaattcagagcaatggagaggcctggaggggtgggagggaggggtgtgtaagctcgtcctgcatgactggtgtgcactgtgacgggcttctaataggtgaaataaaattgtagtcaccaccgtaaaagacttctgctgcaatttattaatcagggtctggggagatcgatgacactgaatgattatgtagcattaggcgaacgccccgctcctttggcaatgctgctctctggatgggctacagatgctcacatctgcttttgttacagcctcaaactcctgcgacctggcatgaagttaatgaaggcccttgcactattccccacattcctttagcaaagttaaccatatctggtcaacctggaaatccaatgagttaattaagacagaattgtctatgatttccttttacattataactgccccctcaaccctcaaccacccctacatggacgcggtccccctcctccctgcaaacctaagcagtgaaactgcctcttgccccatgtgccagaatgattaatggggggactacaatgaggtcaattagctagggtcggcttgaagctgaaaggtggagtgtgtttctttattgaacactgcattcacactccaaacagtgacctgcgctgcagtgatttattgcgagggcagtcctctgatcacttaccttcagtgcttgtaccttggctttgaaaaccgggctttcactgtcaattaacgccagacaaggagatccattcaaaatctgaaatgcatacctaataatggaatgagggcaggggcggtggaggggaggggctgagcgcagagggtagcagcccgggacagtggctctgtggccagcgggacacccaagctgtggaggggctgggctttcctttgaggactaaaatgctttgggtttgaaagcacgttaccctgcttggcaacagaatcttgaaggggtcgctttgttggccccaaagggcacactcttctactcagttttgtagacatgagagagctgcaggaaaaacttagtagtttctgtgtattcttaaagtgatgataatttcttgcacgggcctctgaagtgggatttcaacatgagtcacttgcatttgggggcttttctttttctttttttttttttctttggagacagagtttccttcttgttgcccaggctggagtgcaatggcgccatctaggctcacctcaacctctgcctcccgggttcaaatgattctcctgcgtcagcctccctagtaggtgggattacaggcatgcaccaccacacccggctaattttgtatttttagtagagatggggtttctccatgttggccagactggtctcaaactcccgacctcaggtgatctgcctgccttggcttcccaaagtgttgggattacaggcatgagccaccgagcctggtgctgggggcttttcaaacaaggattattagcatctcagtgtaacacgatgggttgatacctgtataaaaaatactaaggcaagaacgagacttttcagggatggtcaagaatatgtagtgggtaagtcatgtttcttcctatgattattattatttggtttgcattttttattgatatcaacattcatacatatttgtggggtacatgtgatattttgttacatgcatagactgtgatgatcaagtcagggtatttgagatatctaccacctctaatatttattatttattttttttttttgagacggagtcttgctctgtcacccaggctggagtacagtgtcacgatctaggctcactgcaagctctgcctcccaggttcacgccattctcctgcctcagccttctgagtagctgggactacaggcgtccgccaccatgcccagctaattttttttttgtatttttagtagggatggaattttgccatgttggccaggctggtctcaaatgcctgaccttgtgatccacccgccttggcctcccaaagtgctgggattacaggcgtgagccaccgtgcccggcccacctctagtatttattatttctatgtgttgagaatatttcaagtcccctcctagctgttttgaaatatacaatacaatactgttaactttagtcacgcaactctgctgttgaacattataatttatttcttctaagtgtatgtttgtctctttgtacctgttagccagtctgtctgtattccctcccctctacagatccacaccattcccagcctctggtatctattattctattctctacctctgtgatatcaatatttttagctcccacatgtgagcgagaacatatggtatttgtctttctgagcctgggcatcatctcacttaatataatgatgtgcagttccatccatgttgcttcaaattacattatttcatcctttttaatgtgtgaacagtatttcatagtgtgtgtttatacatctcacattttcttcattcattagtggattgtacattgtttccatatcttaactattgtgagtagtgctgcagtgaacatgaaagcgcagatatctctttgacatactgatttctttcgtagataaacacagagtagcaaggtggcaggatcatatggtagttccatttttagttttctgagaaatctccatactattttccgtggttgtactaatttacattcccactcacagtgtgtaagagttcacttttctccatatcctcaccagcatctgttactttttatctttttaataacagccattctaactgggggtaaaatgatatttcattgtgttttgtttgtttttttgagacggagtctcactctatcgtttaggctggagttcagtgttatgatctcagctcactgcaacctctgcctcctggtttcaagcaattctcctgtcccagcctcctgagtagctgagactacaggcacaggctaactttttgtatttttaggagagatggggtttcaccatattggtcaggctggtctcgaactcctgacctcaggtaatccacccaccttggcctactaaagtgctgggattacatgcgtgagccactgtgcccagcctcattgtggttttgatttgcatttctctgatgtttagtgatggggaacattttgttgtatatctgttggccatttgtatgtcttcttttgagaaatatctattcctgtcctttccccactttttaggcattatttgtttttgtttttgctattgagttgtatgagtttttgtatattccggatattagtaccttctcagatgaatagttggcaaatattttcacccgttcaacaagttgtctcttcgctctgttgattattttctttgctgtgtagaagctttttactttaatatagtcccatttgtgttttcgttgcctgtgctttcgaggtcttaggcataaaatttttgcccagaccaatgtcctgaagtgtttcccctgtgttttcttctagtagttttatagtttcgtcttagatttaagtcttttatctaacttgagttgatttttctatatgatgagagataggggtccagttttatgcttctgtgtatgaatattcaattttcccagcaccatttattgaacatgatgtcctttccccaatgtttgttcttggcccctttgttgaaaatcagctagctgtaaatatatggatttatttctgggttctctattccattggtgtatgtgtctgtttttaataccaataccatgctgttttgcttactatagccttgtaatatgttttgattccaggtagtgggatgtctccaactttgttctttttgctcaggattgctgtgtctattctggctctctttggttccatatgaattgtaagattgttttttctatttctgtgaaaaattatgttggtactttcatacagattactttgaatctgtagattgctttgggcagtatgggtatttaacaatattaattcttctaatccatgagcatgggatatctttccatttgtgtcctcttcaatttcttttatcagtgttttgcagtttttcttatagaggtctttcatctttttggttaaatttatatttagatattttaatttattggtaggcattgtaaatggaattggcttcttgatttctttctcagccagtacactattggtgtatagaatagtgtatgttaattttgtatcctgcagctttactgaatttatcatatctaagagttttctggtataatctttaggtttttctatatataatatcattccttcaatatgagatccaaaaattaaaaatatgtaccattatatcatctgcaaagagggaaaatttgacttcctcctttacaatttggatgcctgttatttctttctcttgcttgactgctctggctaggacttccagcactctgttgaataggagtggctaaagtgggcatccttgtcttgttccagttcttagaggaaaggctttcagtttttctccattcagtatcatgttagctgtgggtttgtcatctgtggtctttattatgttgtgttatgttccctcaataactagttgttgagacttttcatcataaaaggatgttgaattttatcaaatgctttctctgcaactgttgagatgaccatatggtttttgtccttcattctgttgatgtgatgtatcacgtttattgatttgctttttttgacccatccttgcctcctgaggacttgatcatggtgtcttatctttttgatgtgttgttggattttttttgctgttattttgttgaggatttttgtgtctatgtttatcagggatattggtctgcagttttttttttgttgttgcatcattgtctggttttggtatcagggtaatgccagcctcatagaatgagttatggaaaattccctcctctttaactttttagaatagtttgaggagaattggtattagttcttgatgaaagtttggttgaatttcacactgaagtcatccagtcctgaactttgctttgttgggagactttttattactgattcaatctcattattcattattggtctgctgtggttttctgtttcttcctgattcactcttggtgattgtatgtatccaggaatttatccattgcctgtagattttctattttattagtgtatagttgttcataatggtctgtaactttttgtatctctgtggtgtcagtttttaatgtttccattttcatatctgattttatttgggtcttctctctttttttcttggttagcctagctgtctaaagcaatctacagattcaaagtaatccctgtttgttggttttgtttatctttttttaaaaaaacaactttttgttttattgatcgtttgtatttttgttttttgttttgtttttgtttgttttttttggtttgtttgctttgagatggcgtgttactctgtcacccaggctggagtgcagtggcatgatgtcggctcactgcaacctctgcctcccggattcaagtgattctcctgcctcagcctcctgagtagctgcgactacaggcacctgccacgacgcctggctaattttttgtatttttagtagggacagaattttgccatgttggccaggctggtctcaaatgcctgaccttgtgatccacccgccttggcctcccaaagtgctgggattacaggcgtgagccaccgctccctgctgatcctttgtatttttttaagtctaaattttatctagttctgttctgatctttattatttctttccttttactaattttgagtttgctttattcttattttcctagttcctcaaggtacattgttagattgttcatttgaaatatttttacttttttgatgtagacatttactgctataaactttcctcttagcactgcttttgctgtatcccataggttttagtatattgtgtttcaattttcatttgttttaagaaatgtttctatttcctccttaatttcttccttgacccaattgtcatttaggagcatgttgtttaaattccatgtatttgtgcaattactcaagttcctcttgttgttaatttttagttttattccactgtggtctgagaaggtacttgacataattttgactttaaaattttgttaaaacttgtttttgtgttctgacatatggttgatcctggagaatgttccaagtactaatgagaggagtgtgtgttgtgtagctgggtgaaatgtactgtaaatgtctgttaggtccatttggtctaatgtgcagttgaattccagtgtttttttttgaatttcctgtctagaccaatcaagcttgtccaactcaagggctgtgtgcagcccaggacagctttgaatgtggcccaacataaattcataaactttatgaaaacattgagatttttggctgggcgtggtggctcacgcctgtaatcccagcactttgggaggcagaggcaggcggatcacaaggtcaagcggtcaagaccagcctgagcaacatggtgaaaccccatctctactaaaaatacaaaaattagccaggcgtggtggcccacacctgtagtctcagctactcaagaggctgaggcaggagaattgcttgaacccggaaggcagaagttgcagtgatccaagatcgcgccactctactctagcctagcctgggtgacagagcaagacttaattaaaaaaaataaaaataaaaaattgagattttttttgtgatttttttttttaagttcatcagctatcattagtgtattttatggatggtccaagacaattattccaatgtggcccacagaagccaaaaggttggacacccctggtagatgatctgtctaatgctgtgagtagggtgttgaagttcccaattattgtattgaagtatctctcttcctttaaatctaatatttgctttatatatctaggtgcttcactgctgggtgcatatttgtttagaactgttatatcattttgctgaattaatcccgttattattatataatgacctttatctctttgtactgttttgtctttcaatctaagtatagctactcctgcttacttttggttttcatttgcatagaatatctctttccatcctttttctttcagtctatgtgtatgtttacaggtgggatgagtttcttgtaggcagtctagagttgggtcttgtattttcatccattcatccagtctatatcttttaagtggaaagtttaatctgtttacattcaaggtcgttattggtatgtgaagatttattcctatcattttgttaattgatttcttgttgttttgtatgtcctttgttcctttctttctctcattgtgtatcattgtggtttggtagttttctttggtagtggtagcatttgattccattttcttgcttatttatgtgtttgctccaccggtgggttttatagtttcatgtgttttcatgatggtagatattatccctttgcttctaggtatagaactcccttaagcatttcttgtaggaccagtctaatggtgatgaattctgtcaccttttgcttgtctaggaaagactttatttgaccatcatttatgaagcataacttagctaaatatggtatctttggctgacatttttttctttcagcacttggaatatatcatctcattctttcctagcttgtaacatttctgctgagaaatccactgttagtctgttgggagttctaagtgactagatgcctttctcttgctgtttttagaattgtctctttatctttgactgttaacaccttggctataatgtacagtagagaagacctttttgcattgtatctgtttgggaatctctgagcttcctgcatcttgatgtctaaatttgtttttagtcttgggaggttttcagctattatttcattaaataggttttctaaccccttcattttctcttcaccttctgtgataccaaaaatttgaatatttggttgctttatggtatctcatatgtcatgtaggcttttttcatttaaaaaaattcttttctctgtatttttgtctgcctgggttatttcaaaagaacttagagctctgaaagtcttccttctgcttgctctaatctatttttgaagcttttgcatgtattttgtatttcatttaatccttcagttctagaatttgtttcattttttaaatgacatttatctttttggaaaatttctcattcatatcccaaattgtttttctaatttctttatattgttcttctgtattttcttaagcttcttaatatcattattttgaattctctttttgaggtttcataaatttcttgattgaagtctgttgctggtgaatcattgtgttcttttagaggtgtcatgcttttgtatgatagcttccttcatgtttcatgtgaccttacattgctgtctatgcatctgatgtaagagttgcttcttttgatattttgaatttgcttttgtaggggagcactttttttcctgaagatattgatatagtgttggttggataggacacattggctttgattctgcgtgcgtgtagtagtatagtctctgtatgatttcttttgctgtaaataatgttggtggtttctgatttcctcaatgacttagagtgcagttgttaatgaagcctgcggcaaagttttgctggatatgggaatactgggtgcggggggctgtctttggaccctagtggtggcagtggtgggccaagtatgcctatccttgcgccacagggtagcatatgctggcaccagtgctactgagttcaagtgggtcaattcgtggacctccaggtggcttgctcaggtataggtagtgccagtggtaggctaagcagatgaacaggttctcaggctcctgggcagcaggtgtggcatggacaatggcagagtagttgtgggactaacctctgggttccaagtgttccatgctggtgttagtggtggctgtgacagaccgggtagttcaacccccaggcccatgggtgggtgcctgctgtggtggtagcagcaggtttggtgggcccaacttcaggcccctgggaggagtgctcaagtgtcaatggtggtggattgagctgggtggtccccaggtccccagacaatgtgctcaggcactggcagtgcagagccaggccaggtggctctatcctcaggctccctggtggtgcatgcatgtgttggctgtggtaggaaggggtgggctgatcctcaggcccaaggcagccaagtctggtgaggcagctgagcaggctgcctcacttccctctctttctttgctttaggtgtttcctgtcacttctctgttgaattccagcgttctctcttagatggtatatttgaagtgtgattatcttctcaatacttcagtggttctttatggaggaggcgagtaccagacgcctctagtcagtcatattgaggggcttcctttctttctgttctcaatctcaggactcttagaacacctcagcagtatggtctcacctttgggaatgtccacaagaacatcaaaggatttgggatttcatcccctggtctattgcattctctggaaggttcttcctccaataccagcatagatcacccctcaactccttctggtctttgctcaagtggcaccttcttagcaaggccttccttgaccacgtattcaacttgcagctcccctttcccctttctggttttatttttctctttagctttcatcgccatctgacatagagacagctttctgtatctgtagtttccacatctagggattccactgactgctgattgaaaatatttgaaaaataaaaaataacaatttaatacttttaaaatacaaatttaaaatatatagtgtaaccacaatttatatagcattgtcagtaatctggagatgacttaaactatacaggaggatgttcatcaattatatgcaaatactatgccattttttaaaaaattttattattattatactttaagttttagggtacatgtgcacaatgtgcaggttagttacatatgtatacatgtgtcatgctggtgtgctgcacacattaactcgtcatttagcattaggtatatctcctaatgctatcccctctccccccaccccacaacagtccccagagtgtgatgttccccttcctgtgtccatgtgttctcattgttcagttcccacctatgagtgagaacatgcagtgtttggttttttgtccttgcgatagtttactgagaatgatgatttccaatttcatccatgtccctacaaaggacatgaactcatccttttttatggctgcatagtattccatggtgtatatgtgccacattttcttaatccagtctatcattgttggacatttgggttggttccaagtctttgctatcgtgaataatgccgcaataaacatacgtgtgcatgtgtctttatagcagcatgatttatagtcctttgggtatatacccaataatgggatggctgggtcaaatggtatttctagttctagatccctgaggaatcgccacactgacttccacaatggttgacctagtttacagtcccaccaacagtgtaaaagttgttcctatttctccacatgctctccagcacctgttgtttcctgactttttaatgattgccattttaactggtgtgagatggtatctcattgtggttttgatttgcatttctctgatggccagtgatggtgagcattttttcatgtgtcttttggctgcataaatgtcttcttttgtgaagtgtctgttcatatccttcgtccactttttgatggggttgtttttttcttgtaaatttgtttgagttcattgtagattctggatattagccctttgtcagatgagtaggttgtgaaaattttctcccattttgtaggttgcctgttcactctgatggtagtttcttttgctgtgcagaagctctttagtttaattagatcccatttgtcaatttttgcttctgtttccattgcttttggtgttttagacatgaagtccttgcccatgcctatgtcctgaatggtaatgcctaggttttcttctagggtttttatggttttaggtctaacgtttaagtctttaatccatcttgaattgatttttgtataaggtgtaaggaagggatccagtttcagctttctacatatggctagccagttttcccagcaccatttattaaatagggaatcctttccccatttcttgtttttctcaggtttgtcaaagatcacatagttgtagatatgcagcgttatttctgagggctctgttctgttccattgatctatatctctgttttggtaccagtaccatgctgttttggttactgtagccttgtagtatagtttgaagtcaggtagtgtgatgcctccagctttgttcttttggcttaggattgacttggcgatgtgggctcttttttggttccatatgaactttaaagtagttttttccaattctgtgaagaaagtcattggtagcttgatggggatggcattgaatctgtaaattaccttgggcagtatggccattttcacgatattgattcttcctacccatgagcatggaatgttcttccatttgtttgtgtcctcttttatttcattgagcagtggtttgtagttctccttgaagaggtccttcatgtcccttgtaagttggattcctaggtattttattctctttgaagcaattgtgaatgggagttcactcatgatttggctctctgtttgtctgttattggtgtataagaatgcttgtgatttttgcacattgattttgtatcctgagactttgctgaagttgcttatcagcttaaggagattttgggctgagacgctggggttttctagatatacaatcatgtcgtctgcaaacagggacaatttgacttcctcttttcctaattgaataccctttatttccttctcctgcctgattgccctggccagaacttccaacactatgttgaataggagtggtgagagagggcatccctgtgttgtgccagttttcaaagggaatgcttctagtttttgcccattcagtatgatattggctgtgggtttgtcatagatagctcttattattttgagatatgtcccatcaatacctgatttattgagagtttttagcttgaagggttgttgaattttgtcaaaggccttttctgcatctattgagataatcatgtagtttttgtctttggttctgtttatatgctggattacatttattgatttgtgtatattgaaccagccttgcatcccagggatgaagcccacttgatcatggtggataagctttttgatgtgcttctggatttggtttgccagtattttattgaggatttttgcatcaatgttcatcaaggatattggtctaaaattctctttttcggttgtgtctctgcccagctttggtatcaggatgattctggcctcatcaaatgagttagggaggattccctctttttctattgattagaatagtttcagaaggaatggtaccaattcctccttgtacttctggtagaattcggctgtgaatccatctggtcctggactctttttggttggtaagctattgattattgccacaatttcagctcctgttattggtctattcagagattcaacttcttcctggtttagtcttgggtgggggggtgtatgtgtcgaggaatttatccatttcttctagattttctagtttatttgcatagaggtgtttgtagtattctctgatggtagtttgtatttctgtgggatcggtggtgatatcccctttatcattttttattgtgtctatttgattcttctctcttttcttctttattagtcttgctagtggtctatcacttttgctgatcctttcaaaaaaccagctcctggattcattaattttttgaagggttttttgtgtctctatttccttcatttctgctctgattttagttatttcttgtcttctgctagcttttgaatgtgtttgctcttgcttttctagttcttttaattgtgatgttagggtgtcaattttagatctttcctgctttctcttgtgggcatttagtgctataaatttccctccacacactgctttgaatgtgtcccagagattctggtatgttgtgtctttgttctcgttggtttcaaagaacatctttatttctgccttcattttgttatgtacccagtagtcattcaggagcaggttgttcagtttccatgtagttgagcggttttgagtgagttgcttaatcctgagttccagtttgattgcactgtggtctgagagacagtttgttataatttctgttcttttacatttgctgaggagagctttacttccaactatgtggtcaattttggaatagatgtggtgtggtgctgaaaaaaatgtgtattctgttgatttggggtggagagttctgtagatgtctattaggtccacttggtgcagagctgagttcaattcctgggtctgtctcattgatctgtctaatgttgacagtggggtgttaaagtctcccattattattgtgtgggagtctaagtctctttgtaagtcactcaggacttgctttatgaatctgggtgctcctgtattgggtgcctatacatttaggatagttagctcttcttgttgaattgatccctttatcattatgcagtggccttctttgtctcttttgatctttgttggtttaaagtctattttatcagagactaagattgcaacccctgcctttttttgttttccatttgcttggtagatcttcctccatccttttattttgagcctatgtgtgtctctgcacgtgagatgggtttcctgaatacagcacactgatgggtcttgactctttatccaatttgtcagtctgtgtcttttaattggagcatttagtccatttacatttaaggttaatattgttatgtgtgaatttgatcctgtcattatgatgttagctggttattttgctggttagttgatgcagtttcttcctagcctcgatggtctttacaatttggcacgattttgcagtggctggtacctgttgttcctttccatgtttagtgcttccttcaggagctcttttagggcaggcctggtggtgacaaaatctctcagcatttgcttgtctgtaaagtattttatttctccttcacttatgaagcttagtttggctggatatgaaattctgggttgaaaatccttttctttaagaacgttgaatattggcccccactctcttctggcttgtagagtttctgccaagagatccgctgttaatctgatgggcttccctttgtgggtaacccaacctttctctctggctgcccttaacattttttccttcatttcaactttggtgaatctgacaattatgtatcttggagttgctcttcttgaggagtatctttgtggcattctctgtatttcctgaatctgaatgttggcctgccttgctagattggggaagttctcctggtaatatcctgcagagtgttttccaacttggttccattctccccatcactttcaggtacaccaatcagacgtagatttggtcttttcacatagtcccataattcctggaggctttgttcatttctttttattcttttttctctaaacttcccttcttgtttcatttgattcatttcatcttccatcacagatacccattcttccaattgatcacatcggctcctgaggcttctgcattcttcacgtacttctcgagccttggctttcagctccatcagctcctttaagcacttctctatattggttattctagttatattcatctaaatttttttcaaagtttttaacttctttgcctttggtttgaatttcctcctgtagcttggagtagtttgatcgtttgaagccttcttctctcacctcatcaaagtcattctccgtccagctttgttccattgctggtgaggaactgcattcctttggaggaggagaggcgctctgctttttagagtttccagtttttctgctctgttttttccccatctttgtggttttatctacttttggtctttgatgatggtgatgtacagatgggtttttggtgtggatgtcctttctgtttgttagttttccttctaatggacaggaccctcagctacaggactgttggaataccctgccgtgtgaggtgtcagtctgcccctactggggggtgcctcccagttaggctcctcgggggtcaggggtcaggaacccatttgcagaggcagtctgcctgttctcagatctccagctgcatgctgggagaaccactgctctcttcaaatctgtcagacagggacatttaagtctgcagaggttactgctttctttttgtttgtctgtgcccttccccaagaggtggagcctacagagacaggcaggcctccttgagctgtggttggctccacccagtttgagcttcctggctgctttgtttacctaagcaagcctgggcaatggcgtgtgcccctcccccagcctcgctgccgccttgcagtttgatctcagactgctgtgctagcaatcagtgagactccgtgggtgtaggaccctctgagccaggtgcgggatataatctccttgtgcagcatttattaagcccatcggaaaagtgcagtattagggtgggagtgacccgattttccaggtgccgtctgtcactgctttctttgactaggaaagggaactccctgaccccttgtgcttcctgagtgagacagtgcctcaccctgcttcgactcgcgcatggtacactacacccactgtcctgcacccactgtctggcactccctagtgagatgaacccggtacctcagatggaaatgcagaaatcacccgtcttctgcgtcactcacactgggagctgtagactggagctcttcctattcagccatcttggctgcctcactatgccatttttaaaattattttttgtacagacggggtttcgccatgttgcttagactggtcttgaactcctgagctcaactgatctgcctgcctcagcctcccaaagtgtggggatttcaggtgtaattatgccattttatatcagggacttgagcatcttcagactttggtatccatggggttcctggaactgatcctccactgatacttagggatgactgtactctgttttttactaatgtatttgttcatcatctgtgtctaccacaagaatataagcttcataagagcagagagtttgcggccttttgttcactattgtgtccctgtgccaagaataaaggaaagaatacaggaaccctctcacccctgcaaatatttttccaaagattgtgtgtcttactggtttctcagactggtttgtgttttaaaactatctatatttaattcttgtttttaaagtgtctgtagttgacagttctaacagtaaaacattttaaatttttatgattgattacagctccgtgtatcttttcttttatttttcttttgagacgaggtctcaatctgtcacccaggttggagtgcagtggtgtgatcatggctcactgcaggctcaatctccccatgcttaggtgctcgtctcacctcctgagtggctgtgactacaggtgcatgctaccatgcacagcaaattattccctatacctttaaaagcacttctgcacaggtcacctctttctttagtttccctctgtaaaattggataataaaccctgtttcatggcaccattgtgtgaattaactgagatgttgtatgttttgcatgcagtaggtgcttaataacaccagttcttattattttgcatctgaacatcagaaaaatccttataagagacacagagcaggataataaattatccacatcttttacatgaaataactacagtcagaggtgttaaatgagttgcccaaagtcacccaatgaatcagtataggcagcggctctaaactattgccttgatggaaacccttattcttggtttttatttattcagaaatgaagctaactaaaaaataaattctattcaatctcaaaaatctaaagaggggctactataatggtattggggaaagaggtagttttaagaatatgcagtggcaaatgttttcccatctgaacaaaaaagatatagtcacatctaagcatccaggacaaagctttgggtgtctccgtatcattgaccttttctcgactcctctctatcctactcttgaaagcatgttatagtgagaatgatgggacactttcgtgtgtgtgtgtgtgtgtgtgtgtgtgtgtgtgtgtgtgtttttcattttttcttttttttttttcctgagacggggtcttgctcagtcgcccaggctggagtgcagtggcgtgaccttggctcactgcaagctccgcctcccgggttcatgccattctcctgcctcagcctcctgagtagctgggactacaggcgcctgccaccacacctggctaattttttttttctttttttttttttagtagagacggggtttcaccatgttagccgggatggtctcgatctcctgacctcatgatccacccgcctcggcctcccaaagtgctgggattacaggcatgagctactgtgcctggccaatgctttttgaaatttctgttatttataggaaaaaaccatttgcaaaacttggtatacattaacaataacaaattactctcctcatataccatggtggaccacagtagaccagtatcctaaggccatatttgagactacagatccacgccaggagactaaccccctttccattctctggggttgcaaagtcatcctcaccttgaatttcctctcagaaattgacatgtggaagggacagcacagtggtgaaccagctcctcttctggcagttaacactgctatctctccactgactcagaacttgataactcctataatgaggaaataaaagaattagactaacctttccttagaactgtcctggtttctctgccccctttccccaggagacacttaatgacagacatgtgaatttggaaagaccattttggttgttcctttccttctcaattacagatttgttcctttggaatgtttctggaaggtttatctcaccccactttaaatgcacaagtcagtgggacttccctggatttctcttgggaagtcattctgacagctggaaggtctctcatgatcagcagacagtagctccctctgtttagaattagcttaggaatagggaacatggggatggcattctgaatctgtgatgtgattggcatgtgggggccctggctgacgaggactgatcacaggcttcctgtagcttggcatggtggagtgagcacggcatttggagtcggggtctgggcttgacccacacttctacccctaaccacctgtgtgtcttttgaaaattgccatgccttcacttttcttacctataagacagggttaataatatccactttgcaagactgttttcaggagtgaatagtatatatttgcaaaagcatcttgaccatgctgtgggacatcagaaatggggctaggggagaagatctgcctacctccaagaaatgtgaaccctggaaagccacctgtgtattgtgaacttccagataaaagtgagtctgtaggaggacaggaaggtctacagggaagaagtgggggctgctggaccacgatatgttggctctaggttcaaatggcagctctgtggctatggctgtattgcctgtgagtggaagtgctgttaggccaagggagaggattatggacaaaggacaggggtctgttgccagttgtcatgtccatccgtagccaccatggaatgctggaaggtgaacatgaatatcccaggcctgtgtttgagatcctccctcagggaccaaataggagacaagtagggtgaaagcgagagtttgagtttgtagctacatgcaaattggccaaagctggataatggggccataccacagggtgccctgggagattagagccaggctgggctttcccacaccagtgggtcccaggggtcctttagctaccacgtttagtatcagaggaaatgggatatgcatcctggatagggagccccagagaagagtggaacatcaagacccagggaggaggctgacagctagacacaggtccatggtgaagggctgggtaggacagaaagagcagggcccccaggcagagggcgaggcctttgctagtggtaagaaatgggatccggggttaggagcccactgaagggtgcacaggaggaaggggactgtggcattggctgcatcacataggactaatgggattagaagtagacatggataggctttctcccttttctatcacctatgtccctatctctcccttcttgcttctcccgtcatgtacttgcagcagtccaggggcaacttctgttggcaaaatgcctttttccttggaaagtcaagtgtgacaacaaagatggagtctaggacagctcttctccatcggtgtccacagaatgttatgtaaaaaaaggagaagggttatgtcaagttacgatcctgcgagctaggcagggcagggtctcctatcaccatttagtagtgaggacttaaattagctacctaagcttactcagttggtaaaaaggcaaacctgggtttcaaagacagatctcctggctgtggatcaattgaactcttcgggtaactgtctattcacagctgtgtctctaacctgatatgcacaaggtgaatatgcacatatatagatgtccacactccaccctcccaaagtcatggaaaaatgaaagctttaataaatatggttgtagataaaggaacagctcataatgacatgtgaaagcaattctgttaacaattgaaacaaattatctatatgactttgtaagatgacatgtaatgatcatagacaaaaaatgaactagtctcagaataaaagcccttgtcaggagaaaattcactgctcattatgggattgatcgtagactgcttctttcctaatttaaacctaactctttaaaattaaaaattagaagtatgtgtggaaagagaagtagattaagagctaagagacctgggttttcatccttgctctgtggctaatgagctgtgtgacacttcgaagtgactcagtctttgaatctttgtttcttcatttgaaaaaagaatgggtacatcagataatctctaatgtccttttcagtgccaaaatattgtaataagctttttttttttttctttgagaaagggtctcagtctgtcacccagatgggagtgcagcggtgtgatcatagctcagggtgccttcaagtgatcctcccacctcagcctcctaagtaactgagaccacaggcaccacgatgtctggctatttttttttcttcattttctgtagtcatggagtgacactgtgttgtccaggctagtatcaaactcctgggctcaagcgatcctcccgcctcagcctcccaaaatgctcagactacaggcatgaaccaccatgcccagctagctaatgagctctttaacagaactcataaacatgtctagaatgtgtatttttatctttactatgatcacaagcacctgccaagggtctatttgcatatgcattatccatgttagcatatgtcccttttgtgggagggggactgctcctaggcatggcttggacttttggcctggctccagtccctccttgcttttgctaaccccttcctctcttggggagtagagtcctacccaaagtctgcatcagggggtctacaccctccagcatggtttgcctggaactccagatcctgttgcatgcagatttctgtggccatgttctttcctggttaaaggcctagtcatcacatcacatatcctctgcttgcctgattagactttcctccactggttgctcctgggtcctggctctttttacccatcccatctaaccagcttcctgagttacttagtttgagccactgttttgacaaaagttgaggttgccttgggtggcctatataaattagggtggtaaggaatagctacacagggaggaggaaatggagatgaagcagactctgttgtcttattaatgttgtctagctctcccaggatactagtacactttggcaggctttaacaggacttacgctttactgcctctgcactccactggcaccagagatgtcttccacacccccctttcccattcttcatctacccatcctctgagagccatgtcaagccttatcggctcaggtcacaagactaagtggtctcccctcctctgaaatggcatgccacatactatctgtagcctccccactctacacatagcccaattaattcccatttcttcagatctcaaccaaaaatcactcttcctccaggaagccctccctggctacacaaacaggccagatccctctgtttagatgctcatgaacccctgttacttttctttaattccaattagtaggttgttaattaaatgtttatttgaatgaagaattgattcccaacactctcccatgaggacagaatctggtctcttccactcactactgtattctccaaggtccagtaaggtaacacccatatactctcttgaaccttgtttactctcttgaacatttatgtaaacactgattacttgcctaaagatcttttctcttgagctgatttgcatcctccttgaaggcagttccatctttctgttgttccttcacagtccagcactgttctgaataaatatacgtcaatttggtgtttcagttgtaggagacattatttgatcattagtctgaatttacaccatatgaactgtgaaggagacttcttcctgaacattttactgaactgaactgggatccgcttgcaggcccagcaaggctaaacacccacaccaagattttgcagggaaagaaaggaaagcgtttatttgcagggcaccaagcaaggagaattgggccactcatgcttaagacccgacctccccgatgacttacaagcgaaggcttttaagggcaggggtaaatttcaggaaagcagaagttacaggcaaaactgtaaattaatacgtggatgttaaacattagtttaatatttgttaaacattagtttatcccacctaaaaaggtgggtttaggtgggatatctggaaatggaggcttacaggccacaggtggattcagagattctgatttgtgattggttaaggaatggaagctctgtctaaaaacttcggtcagcagaaagaaatgttgagttctggcctatggatgtgccttcctccaggcccctcaggaagaaatacagaacaaagaatggcagagttcagtcctcagtttccccttgaggtctatgtgccaggggattcatttagtgggggcctagctttctgaaaaacacttcagaggcatatgttaagatgttctctttagtttccatagggagccaaatatcttgtgactaatttccttggctattgttttaagctactattactttcttgcttaccaagttgctcatttacttctcagggctagctaggtgcctgtaatttcccttcagggaactcacgattttcctttatttccatgtttgggagggcctgttaggtccctaagagggggtccttgctgcatctcaaacttcccatatagaagggaagttattattgaacatcagagttgtagatagatgtgggaagagaaatgaaaaggaaacattcaccctggcttaaggccacaggaggttctcacaacaggacactgtctagggacagcatcgggatgaggaagctcacgggagaagggttggtcttggggttttaggcctgagtccacactgtctgcattccgtggaggctacgcaacctccccaggctttggtccttttccttccacacaatgcaatagatggggtagtgcccggtgagctatggcacaatacatgggtagaagatgatcatttcaaggaatccaataatattcaacacttgccagggttctggatgcaggcttccatttctttttgcaatttggaccaagtaattagatctgtctcttttttttttctttttgcaaaagatgatgctgcgatggggtagaggtgaatagaaataactgccttctctctgcagagttgatgaagcatcaactgggataataaatgtgaaaacaccatgaaatgaaaacatctatttaaattcaagaggttgttatttacagtctttaaatgatatttgcccagctctggttgtttacttttaacacatcccacagaaactgtggaaactacaaaaaccacataaagtgatgattaaattcagaaactcaatctgacctgatctctttgggttggcaatctctctgtgccgttttcttgcttaggactgaggaagctttatagatggaccataaggaggaagtccaggtgagctggtgggagtgtgtgccttcagaaaggggggcctagctttggttaggcctgcagatggattccttgtcagtttcagaggatttagtgaccctgcacttcaattgccccaaaccaaaaattgatctgggactgtgcaggggagaaatggtgaactgtattttgcaggacaggaaagaataagatagacggggagagaaatgctcaccaaagaccatgagctcattcttaagcatcagtgcaacagtcttgttgatgtatcttaccagaagccctaagcagaggagttaaacatgtaggatttgtagtcaggcaggtttgagttcaaattttgcctctacccaggagcccagggtaagttactcttcctctctgtgccttagtttcctatctgcgtgggaagatgaagtccctatctccaatgattattgtgatgatatatgggcattcaataaatgttagtttctttttattactatgggcacaacatcttctgtattattagttcaagccttttagttgtttgaagtcattggcactttctaatctcagagttctcagaagcagcatggtgaactgggagtagattccataaagaatagggttctgttggatgtgccagtaacagctctgtgaccttgggcaagttacttaacttttccagccttgttttcctggacagtaaaaaaggttgcaggccaggcgcagtggctcatgcttgttatgctagcactttggtaggccaaggcgggtggatcacctgaggtcaggagttcgagaccagcctggtcaatatggtgaaaccccatctctactaaaaaataaaaagtacaaaaagttagctgggcctggtggcgggcacccctgtaatcctagctacttgggaggctgaggcaggagaatctcttgaacgcaggaggcagaggttgcagtgagccaagatcgcaccattgcactccagcctgggcaataagagtgaaactctgcctcaaaaaaaaaaaaaaagagggttgcacgttgtcaacaaatacctattgaacaccctggatgttcaagacatgtgaatgactcgaagaagtggcagctgcagaagtgatggccaatgtggaaaagggggttggtggggattggcagagataggggagtccacatgcgaaaccccagtgagggggcaggactgagagtttgtaggtaccctcttccagggtgtaggaggaaatggagaatgcaggtgtaggggctaaggggaacttcagtgaactctgaagtttcactgaaaaatcaacttataatagacagattaattggagaaaaggcatacaaattgatttaacatgtatgcacaggagccttcagaatgaatacccaaatatacagggaaaattgtttatttttatgcttaggtgcaacaaagtatggatagccatgtagaaatacgattggacaaaatggatgtgttctaatgctaacagactgagttaggaaacccagcgaggcctatctgtctagctccttcctggcctctctgagtgtgcattccttccttctgggtgtggggcaggccctctctggaatgagggtcctatgacctacagtcaaataaggtaggtcagataatttctttatggcctatttttacacagaaaggcagaggaagtttagagtaatatttttaggttttatggctgacttggaagaaggggttctggtttctatgactggcctcggggaaaagggattctagtttccatggctaaccttgaggggagagagaggagtgcaggaggtgagagaaaaacttgcttctgaggctgcctctgaaggctttgtttggggatgttgtgttttctgagtcccaacactgttgaataagttaacacctggatggccgagttgatcataaaatagacatgtaagccagggtctgcagcgggaggagtctggatggtttcaagggtggaggtaggtacaagagttagcctcccctaacccctggaggggtagtgggaggaggacagcagctctgcagtgagcaaggaagcccaggacaacccaaatccactgggctgggggctgcacctgccgcacgggggctggccccaggtgggcggggtggaggcggggcttcttcggcgctcgctgattggccatccgtgcaggcaggtgcggtctggcacctcgggatcccaacgggtggccgcctgcgtggctgcctgcctcacctcaggttgttcatcacgctcaggctaatttcccactctgagagctaatgctgatcagccctaagcctcacacgcagtcaggctccagccactttaatttctggctgggaattagagaggaggctgtgctgcccccatgcccctttcctgtagatgttgctgtcgatcaccacacacccaacaaacacctccttttcctacattactcccctcagccccctgatctccccatctccaccattttgcgggggagggggggcaacacttccccctcttaatgtcaccccatccactgccaagtacattctgattttaaagaggcgtcctctaggttgacatcctagcatgaagaggcagcgtttgaccttccttggttaccacactgtcgattcggctggtgtggatggaaaggctcccacactcactcctccttctgtctcttaaaaaaaaaaatcacccacctcccctttcaaataaaaaaagagagggagagggagggagagagaatttgacattgtataatttaaaattgcacagcctagagcccacaaaaccgagcatgtaattacacacttactagaggtaacagcagtgctgataattattctttacacaggagagaccctgctgatatcccacagtcagaaagtgggaactacaatatctttaataccatcctcagagaccctcataagcagaagagaagtatgagaaagctcacaaggtccacagcaatatcttcatcgcgccagaatgtcaggggctttagcacaacagaaatcaatagtttctagtacattttttggtacaatttttttttaatgacctaacctgagaaagtacagggaaggcagaggtacagaacagtaggaaacaaaacctccttaaccgaaggcctatttagacatgtcatgcaacgtcagtttaggagagacgcgttctttatctgagccacacaaccgggcagctggagcgaggtcttggtcctggagtgctttcggtcataggtaaagcctttttgtttaaagcatgaactggtccttctccccgtatttcctgattaaggcagcaccttgactaattattggctataaagttgtgcagtattaaatctctaaagagaggagattaatatccaggcatttctttccaggcatttggcccttttctgctcctttctccctatggacagaaaatgagttggttgcgttttaaaaaataagaccaagcatcagttgaaacactgagaaatttaaagcaacagtcagtgatgccacacagcgaagtaaatggtttttgtgttaaaaaaaaaaaaaaaagtcaaagtataagtttaatactataacttgttttcaaaaggagaccattttggtgtttgcatctctatgctaactacagaaggtgacaaatggttacctatttctactccataaccatagccaagttcttatgtagtttgctcttaaaaatgcttcttcattgttttcaggttgtgctgatgttctgatttgacaatgtgcattaattcagctgggctaataaaccaatttaattgggtccattgttcagtagaaatggcagccaatttttgcttggggcttaggggaaggacactctgactgattatttaccgtgtgccaggcataaatggatagatgcatttctgtacattagtcatttaagactcatactgcttctgtgcactttgtagtatcctcctattttaaatatgaaaaaactgagactcaaacaggtgaactcggccaaggtcacacagctgataaagatggaagagcaaagactccactcagctctgtcgactttggacagaagggtgtattgtttcattttaccattcgaatggtatggccaagccagtgagtttaaagggagtgggaagctcagagcagggaggccctcggagatgcctttacaaaatgtcttttggtgaggacatcacatcacaacgtatggacaaagaaacacagtgccagaggagtctttggtgactccccagggaaaccgattctaggggcagcagacgccaggctggtctgcacctggggcccagtgaaggcagcagttagctattaggccacctgaaaagagggaattagaggacaggcagatgttttcaatgcatgagcaaaagtgaagacattggcctgagaagtagagagctcaaggccagaagtctgaggggatgaatggagttacatctgttggaggtgttcagatttccggtacgcagggttattccggatatttcagctatgttaactggctttttggtttgttctgggtggagtgggggccatgacatccctgacgctgctaatttaaagaggctgtgttagcagactcagggtaaggactacaggtatataaaggccttatcagcggcggccacagactatttactctgagcctcccacggcggctggctccaatactgtgtaatttctgctgcttttgagaaaggtgcaggatacttactgcttattagggctcgtgcttgaaccttaaaagagagtaatcagcaagaccatctctgtgcacgttggtaggaaattggaatttgtcttttggtctgtatctctgtttgcctccacttcagcgacctcagctgaatcctagtgacccaagagcctggatgataacctatggtgtgatccatctcgcggctgtattctcattggtataaaaggcttcaaagggccgggcatggtggctcacgcctgtaatcccagcactttgggaggccaaggtgtgtggatcacctgaggtgaggagttcacaaccagtctgctcaacatggtgaaaccccgtttctactaaaaaaaatattagctgggcatggtggagcatgcgtgtagtcacagctacttgggaggctgaggcaggagaatcacttgaaccctggggatggaggttgcagtgagccaagatcacgccactgcactccagcctgggtgacagagtgagacaacatctcaaaaaaaaaaaaaaaaaaaaaaaaaggcttcaaagacgtctcaaacctttggagagagaaggttgcatgatagacaatgtgatggaagtctggggacaggggacttcgtccagcatcctctcaactcacatattagtgtagcttacccacttggtcctttgtaaatcaatccccatctgtacttcaagagcacaggcttctggaggacaaataaaggaggaagcctccctggggagggaggggcctatgttagggcctagtctgggctgaaggtctggagcacagaagttcagcaaggcaggaagcttgacctttgcaaccagaacagtttgggatgcagctgctctccaggccctggctgtttggatcttgactcttttgtactttctgcccaaatggtcagtggccccgggagctgggatggcaggagttaaggaaagggagcaagatgagttcctgttggtgactcatgccaggaatttcttcaggtccccgtgggggagaggtcattggagacaaggccttctaggatccccagtttaggctactgactcatacacaaatcctttctcttaacatagccatgattatttatgagaattagcaaattgagagtgtaggcattggagtcaaacatgtgactttgagttccaattgggctatttctcagctgcgcaactttgggcaagttattctctctgacactcagtttttttttgtttgtttgttttttgtttttcctgagaaatgagaataaaactctctcctttggggttcctattaataacaaataatagatggaacttagtagagactcaataccagtttctttcacctcttctttctccatcagtttcccactctcgacttttccctccccaaattacaaggcatcagaaattcaggggaaagaagaagagggccaagggaaatgacacaccagtgaaacattgcttgagggatgagtctcaacttctggggtgggatcactcaccccacaggagatccccttggcttgtctattgcatttctaaacccagaggcaaattgaagccatcataagtatgagagataatgtagaaattgcaacaaatattcgaagaaataaaactaccaatacctcttcgccacctccaatatcagagagggctcatggggaagagagtggggagaggggatatcttagaatcattcacctcttgttgctattgttgttaaatagcactcctggcacttcaaactgaaaagcagtgttggcactcaagtcttttttttttttttttttttttttttgagacacagtctcactctgttgcccaggccggagtgtagtggcatgatcatagttcactgcagcctcaacctgtcagactcaagcaatactcctggctcagcctcccgaatagctgagactataggtgcacaacaccacacctggccaatttttttatttttagtagagattggggtctcgctatgttgtccaggcttgtcttgaactcctgagctcaggtgatcctcccaccttggcctcccaaagtgctgggattacaggtgtgagctactgcaccgggttaggtgtccaagtgtttaggtcgtctgagactgcaggtcactcatttaccataaagggaagggagtcaggattattaataaccagaattgccctagagtgaagggcttccttttcatattcatatattcgaaagatggagctgctcatgggcccctttttggcctctttgtgctttcttctggtagtgggtaggttagagaacacggtaaaacacacgactttgccatgtcttgggtcttttcatcctccgtccacctcccgcccccacctacccccgaaccttccctcctttgtgcaaatctgttttcgccacaggagcacatgctgtctcttctagctacaacactacttgctaattcaacgattcatctttaatgaggccccctgccaatgtttaaatagcattcagaacaaagaaaaggcagtatttccaaaacagctgcttctgctgcatcctcatagctcatctctcagaaaatcaagaaaaataccttgacagatgatggaaaaatacctggctattatagatagagatactatctatatatctataaatggatatggataaagataaaatacccacttctgtgatgccagagatcttgaatataagcatcctaaaaagttttgttgggtttagatagtgctacttcagggaggcttttctttatgattttggttcttttcagaattgtttgggaaacatatttagtcatggaaagagcacgcaatttgggattagttaaatctaggcccacctttgagctctgtcacagactagctgtgtaagtgggtagatcatgtgagttctctgcccatatgttacgttattggtaagatgaagataatactttcttcctttctggatatatgtcagcgtggctagctcaatgtttggcaaatagtagacctgcaaccatttctttattttatattttattttttgagacagggtcctactttgtcacccaggctggagtgcagcggtgcgatctcggctcactgcaacctctgcctcccgggtttaaacaattctcctgcctcagcctccagagtagctgggattacaggaacgtgccaccacacccggctaattttttgtatttttagtagagacagggtttcatcatgttggccatggctggtcccgatctcctggcctcaagtgatccacctgcttcggcctcccaaagtgttgggattataggtgtgccaccacagctggccatttcttggttttaaattcaggaccctctaaaatcataaagcattggcagagtccaaaggactctgtgcctgtgtttccagaagtgctgctccaggggcaataagtcttctcagtagccatctctctaatgtgcctcatcaattccacacctttgagtaagaaaggatgagcatcatgtagagaaggaggcttggggaagtcacagttgcttttatgagtttttaaaagggagatttaaaataacagagactagaaaaacaataaatgaacccaaggaaactagaagaaaggaataaatgtgtttcaaacaattaacaaactgtaacacagaaatatggtagaattgatttaaaaccatacatggttctttgaaagggggagaaatgtaaactttgaaaaagaattgaattaagaaaacatttaacatcaggcctgagctaaaacctatagacacaaatgaagaaacttttaaattattggggaaagatgaggcagatgttcagagagatatgaaggaaaagtgagggaatgggaggaggaggaggaggaagccaggcttgtccctcctgctgcctgtctggtcaattcttccttgaattccatctgatgctttaatttcattttttgctttagccatcttgaagttgatttctactaggtacttgtaattaaatgaccattactaatacagttgtgaaaatagcaagttacaaagtagttactttaatatgaccctatttttgtgaaagaaaattgtgtgtaaatgtctataaaacaaagcctggaagtgtataccctaaaaatgataacaatggttatatttggggaatgggattataagtgcattttattttctgctttttgcttgtataattgattatgcatgagttatcaggacaagagggctgtttggacttgtgtggattagtggatttgtaagatttagcctatctgattagttaaatatcttgtttatcttcttggcctttaaaagaggagtgttagagcaatgataatatggctgcataagggccagactgttgttgtatagcaagcagggggtgacatcaatgagacgagagaagagagcaccaattagaaaggttaaagggccagataaaggagccaagcaggcgaatccagggttcacagatcctgatagagaacggggctttctgtctgattgccaagaaacaggagatgcctacattgctgttgtaatcaggagtcatttggttgcaaggacagaaattccttcaagcttaaagtttacaaagaaggctccataaaaggatacagggacatcacattgacccctaactgtataactacggcctgctactctgtctctggatctgggtggcctctccttacttctttctgcagctcagatgtctgtgtgaactccaaagctccctccttgataacagcagggagagccagcctctcctaccctgagcttccatagcacattccactgtgctgcagttttctctctttctctctcatctctcttctcttctctcttctcttctcttctctcttctcttctctcttctcctctctcttcttttctctcttctcttctcttttcttttctcttctgtcttctctcttcttgcttctcgtctcacttctcctctcgtctctcttctcctcttgtctctcttctcttctcgtctctcttctcttctcgtctgtcttctcatctctcttctcttctcgtctctcttctcttctcgtctctcttctctcgtctcccccctcgtctcccctctcccctcccctctcccctcttttctttctctcctttcctttccttctctctctctccctctttcctttctttctttcatctctgagctcattattggtaggaatgaactttttcctttctttttcatcaatcaccagaaaactgctcagtacttattttgaatgacaaatatgacagtgtgagggaaagtactgtataaagttaagtactttataaaattatcataatcacaagataatattttgttgtgttctttcaaggcagcctttcttgctttcttactccaggcctgttcctggtataatatccaggcaggccagttgcagaactaaaattaattttaccaatccctctcttggttcagaaatcagatgagatgagacacatggaattgcctattcccatgccttctgcatagtagctgtttatgcttgcttaaatccctgaggaaggtccaatgggaagatgcacaaaaaagaattaggtgttcagtaacttcctatggctctggaggtttttaatggggagactccagcagcttggcctcagttgggccacagtccgtcaaagaatcttaatgcccacatcaagctccattacatgacttcttggtatgcatttgacttttttcatcttctcccatgatcacatttattttaatgtccagaatctgcagctacacataccccctctttgatacttgtctttctacttggcatggctcatagattgttttaatcatgcaatatgatctcaatctctttagaagtaggcttaggtagaaataaatccccactgaaatagtgattccactgtagctttgctcagtggcttttaggaacattctctgttcagcgggactcatcttggccatgaacttttacctatagagcactaattcccataacttccttcaaggagatgttaactcaacaaatacttaattgaacattaatacataccactgggtctctggtgttgcttattttgttttgtgattactaaaccagtacccctgtattcaggggatgcagaacatagaggaaagacaggcaatcctagaatttgtctcaagccagctgtggcagtgatgtagggtagcttacacttccagtgtattcttcatttgcttttctctgatataaagtctggaaagatccgaacacgccttccaaattccccagcagtctggagtgactgtgttctggctgcagttgttgtcggtgaaacatcacagaagtgaggcctcttttcttctttcttcctcctccctgttgtgagtgtggggcttgagcttggcagccctctccaaggctggaagagaaagagaggggagagcttggttcctcggtgcacactccagccctggactgctatgctgatattgctttgtgagagaaataaaccccttatcatttcagctgctgtttgtttatgggagcttgcaggctaaagcagtctcaactcacatatctgccctctcacaggagccttggctggagggatcttacttcacttacattagctcatgaagcccatctagcatgatctacattacaatggacagtctaaccccctccccgcaggcatgggctggcaaactctagttataagaggatctttaattaacagcaaaaatcacatatgacattatttaataggcagacaagaaatcagggatgaataccacttcattcacaactggcagattcctttctcactaatccctttccgctttccattttgctccccccgtgaccccagccttctagcagaaaatactccatttacccctgagctgtcgacctgttttcttctgctcctcttcaatgtggccttcttatctcatttaccttgctcttctgtttccaggcccccttgcctcctgtgatgcattttagtgaattgtctccttattggtagcctggctctattctcactctccaagtcacacagtaactctagtaagaagggaccaatgctacatttccacagaaattgggatcaagtgcaggaaaatacagctaaggaggaatgatttgctcctgggagtaggagctttgggttggagaaagctttgtacgggatttaatgtttacatcgagatgcggaggggacaaaaggatttttttttttttccctcagagaacagaagaaataaattccagagggaggaaagagtgcaatctagatacaggtgggtggcatttttggggagcactgcatagtctcttatagatagagacatgaggaagtggtgtgagagtccctaaatatgaggctggaaagagatatttggaccagagtttgaagaaaacagagaagcttgaaagggttttttttttttttttttttttttttttcacaggtgaatggtaaccaatcaaatcctggaaaggaaactagacagtgttttaatcagggagaaggaaaggaactatatttaataaatatagtttattttctttaaattcacagatcaattttcttcttacaataagccttgatggtagatagataaaatattacactctcatttcatagcagaatgaagaacaaccagtcaggtaactacgggagcaagttcacaccagaaatgactgggggcttgggcagggcaggagcaatgaggatggagaggaagagatggatgacagctgtttcaggaataaagccaataacaaatggaaacattaaaacatcaagtgggctagtgaggaaagtccaagatgggcatgagcaaagtctcagtgaatgaattaataagacagagacgtgttgtagagacaaccagcaggacctgaatagagctgataggatgtagaatgagtcagattaggtggggcttgatggtggtccctgctgtcaaatgttgcagataggtcaaggacatgtaaaactcacagaaacttaatggagagattctgcaacctttagaaagcactcttcacaaatagggcagaagctaaataggaagtgtctggagagtcagtggaaggtaggaatggagaccaggcatgggtgtagccttattttcagcacgtctgatggtcaacaaagaagagatgctgtggaaagttaagcacatgtgtgagggagagggattaagcctgaataaaggccctttgaagggttggagaccttgttgagaagttgaaagactgcaaggtgaatagaaggggagagatcccgggtacaagaaggaagggaggataaagattctctgcatttgtagagattgttacagtttatacagtgcttttgcattcaatgtctcatatagggatatgtgggaccaacatcaccacccatttgatagatgggtaaactgaggctcacagagatcaaatgactttattagagaggggagaccgaggatatgaactcaggatgcctgaaactggttaggattttgttgtttgtttttattcgttgccttccacacgagggaaaacatgacttgaaaaactaccacttaagagtaacacatttttgtggagaaacactcccattcattgcctactttgaattttccaccacaatgaccctgtgaggttggcagaatcagcttttttctcattccattgataagcaaacgcagcctcagcaaggccaagcaacttccatgatgccacatagctaagaaatggccaagaagggcctcagactctcatcttgactcttagatgaacagtccggtcgacaatgaggcttctccctgcacttgtggatgagaggacagcctttcagcagtgtggcagataaacagtgcatctcccccatatttctggttctctgctccctcctggaacctggagggttgtatattgccatgcccttgggttaggcatgaccatctgacttgctttggacaatgcagcatgagctgatgtgcagttcttcacagtcttgtcttctactgtctgggctattttggaagagaaagggatggaagctgctggaatgtcaactaacaccaggaggctagctgcctggaaagttgcctaaacctggagccaactttgagtgagtgagaaataaattaaaatgcctgatatctggagattgttacagcagcatgatctagtttatacagttgaacaccaacaaactcttcccagtgtaaaaaaagaaaaatcccagtgcctcatagataaccctatcccaaagagacaagcatcttcccagaataactgggaaataaacatcactaagtccttctaggagttaaaatgccatcaggacttttttttttttttttttttttttaaggttctattggatgttgagtttttattatgaggttgagttgtgagcttgaggagaaattgtttttacagatgttcagggtgtgttatgaggaaatggccttttacaggggttcagattgatgggctctctagggaccccttctgactacatgcgcagaggaagtagggaggggcctgaagaggcacagaaggacaccatggagtttgaggaagaccaggaaaagggggtggctgagtgatgaactagaacaagatttggagtcacatagacttgggtagagtcctggccaaatcacttaacctatctgagtcttaaaatggttttctatacaatgggaaaaatgatacttgccttatagaattatagtgaatttagatagattcagtcacaagtatgattacttttgtatccatgagggattggttccaggcctccccatcaggatgcccaaatctgagaatgctcaagtcccttgtataaaatgatgtagtatttacacatgatctatgcatatcttcctgtataccttgtcatctctagattacttataatacctaatacaatgtaaatgctatataaattgttattgttttttatttgttatttttttattgtcctactgtttctttgtttgtttgtttttttgagatggggtttcgctctgccacccaggctagagtgagtggtgtaatctctggtcactgcaaccaccacctcccaggttcaagcaattctcccacctcagcctcctgggcagctggaattataggcgtgcatcaccattcccggctaatttttgtatttttactagagatgggttttcaccatgttggccaggctggtctcaaactcctgacctcaggtaatccatctgccctggcctcccaaagtactcggattacaggcatgagccaccacacccggccgaatattttttttaatttattttttatttttaaaatttttttagagacagggtctctctcactctgtcacctaggctggagtgcagtggtgcaatcatagctcactgcagactcaaactcctgagctcaaatcatccttttgcctcagcctttctagtagctggaattactggaacgtgctaccatgcctggctaatttctttatttttatttttttgtagagatggattcttgctatgttgcctaagctagtcttgaattcctgggctcaagcgatcctcctacctcagccccccaaagcactgggatcacaggcgttagccagcatgcctggccactattttctgaggttggttgtattcttgaatgtggaacccatggatatggagggccaactgtagcttacaatggggacttgatggtccagttcttacttttttctcctgaagtgtcaaagcagttgctataaactgaactgtgtggcctcaaaattcctgttttgaggaatatcacagtattccccagtgtggtggtatttgcaggtggggccttaagagatagttaggtttcctgaggtgatgagggtggggcactcatgaggggatttgtggccttgaagaattagtgtcatgggaagacagagagaaggctgctgtctgaaagccagaaaaagagccctcagcagaacccagccatgctggtgtcctgatctcagccttccagcctccagaactgtgagaatatgaatgcttgttgtttaagcactcagtctgttgaattttgttatggcagccggagctaatatagacctgggtttgaacagggagttagaagcttctacttcttgtctacttttattgcttcttttgtgactacattttggggtggtgagaccttgggaagtgcagtttgggcagggtggggtgggggtaccctctttgtagaagttgcatttgagtcttaaatgctgagagcagccagggtgtggctggggagaaaggagcacactgctggctgcttagagctggctccaaggtcatggttctaagtgggccttctgcattgtctggtcttgcttaccagaaaattgatttagggtaggcttggagtcagtatgaaacagaattccacaagctgagtgtcctatctgacaccactcttgggagccccagcaaagtgtgctgggcattggcattgggtgtcaactaggggaggcaaagggaacccccaatatattggccccaagggagaattttgtggtgtcccctttccagagccctgatcttgtacctgtcacctcaagcattttttcctcttgcttggaaggttgtgcagttctaaaagaggacattggatgttgtaatcttttccttaacacaggtttcccaatctttatttgttcacacccaattgtcacattctttagttgttgtatctgtgaaatgtccatcctatcatttatttcataatgcctcaaaatggactcattttatttaaacatatactttagttttatgttaagcaatactattaacgaaattagagtctgtgtttatcttcatttttaaaaaattattattttttttttgtagagatgaggtctccctgtgttgcccagactggacttgaactcctggcctcaagaggtcctctcacctcggcctccccaagtgctgggactaggcatgagccatcatgcccagtctccctttttttttttttcctcgagcacacattacaataaatatgtcacttaaaatttttagagaatattcatgaatgccccacctcacatcaccttggggaccactcataggacacgaaccacatttggggtactcgctttaggagctgaggcgagcagggtaccttacagatgggggtgggacaaagggcgtttgcaaggagcagcaacgttctcgcagcgccagccccatgggtggcctccatctcggtggagcctccgtcttggcactgccatctgctctgagcgagcaggcttttgtgagaagctgtgggagggtaagcctggctgattggctggagccgtgcccagagtgcccagatgtacatttgccccaaaagagggggcacagctggggttcactgtctccctggagggctggtttttctggtgcagctcaaggctgcctccctctttcctgccgcgcattctgctcagctgggcggcgaggagctggcccagagcggcaccgcgagctccctcaccgccgtctgcctgccatttgctgccactggggacctgcgactgcttccatggaaacagaaccatggattgtttttccagaaaacgtctcaatctaatttgtgtagagtcgcgttgcgtgtgtgcacgtctgtgtgtgtgcttcagtcacagaagggggtgagaagtgggaagaggggatttgcatagaacctccaattttccttatttcctagggagttgatgatttcaggtgagtattgcatgtcagacactgagtcttattaagggcttgggttaggaagcagtgaccattatatttgcctagggtactccgaaatacttgaatcctgccttggtctaggtaattctccttctcactaggtcttcctcagaggagggaggtgcatggggagacaaagcatggcagtgagtaagactccgcttagcatttcctaccccggtgtaggactccaggaactgggctgagtcccctccacagtttcccctataccaggaagggcaacatggcctcaaaaagaaataattgggaggtggaggtgggtggatcacttgaggtcaggagttcgagaccagcctggccaacatggtgaaaccccgtctctacgaaaaatacaaaaattagctgggcatggtgtcacatgcctgtaatcctagctactggagagtctgaggcaggagaattgcttgaaccctggaggcggaagttgcagtgagccaagatcacaccactgcactccagcctgggtaacagagcaagactctgtctctaaataaataaaaataaataaataaatcatgtgaactcctgtattttcctctccacagccaaatataagtcttaacgttacatctgcaatggaaaaacaagtcaaactcagcaaaaaggagccctgaagagacagagttaagtgcttccgtgatgagagtagagttggcctatgctgtccctcccaggactcctttacccaagagaaagagagagtgtgcatccaaaggggagtgaaaatagaatataaatagggaaaatagaaccattcagagcagttcagggatctttactactctgacatggaaggaagaaggaggagaagagaaaagatgaacggaccttgaacctgggatatcgctcatgtgactgctacattggtattaagatacagcattcatgtgccctggaatgttttgttctattaggtgctacacccagtagaacagtgctccatccaatgcaattttctggaatttaaacaatccagaccagaatttttcctccttggagatggaatgtcttgctccagagggaggaggaagaagagaaaagagaagtctcaaccagcctcctctctaccccacacagagaatagagatgcaaaacttctcccatagagtgtttcagcttcttcctcgttcctcttgcttcttttctcttgggataatgacttgggtttggccagtatgtaaagttgacttgtggtacctctggctcttctccaggggtgctcacagaaataactacagtggactagaatgagatgcttgaaaccttcccccgagcctagctctgcatttaggagaacagcacagcgcaccatgatctgatataggtataggtgggtgggagtctcagtctgtagttctatatcacctattaagagactggaacctggtcccatgttttctgcaggaggttgagctcttaacaatgtgccaagccagcagctgtgccctagagtcttggcctaagacaagcaaataattgtcagatgactgaatagttctgtttccttattaaatcttaggtttagaattcctttcacaattaaaaagatttggacaacaactttatagggccaattctttttattccaggttatcacaacatcctcaaagaaaaatgcatcatgaatggtcttcataccatctaacagatccagtttaccctcattcctgtggctttgttctggctgctaccttcacttggcatatttctcctccccttcacccttcaaaccatgttttctttcaaggtcccctcaaccctaatgtgcactgtgtctttctgtccactcaagtcctggctgatctctccctattcacacttatgccactattcttttcagctctacccatgtggcgcttgccagatgatgttaccttttttgctttgggaattttgctttcccaactacagcacaagtaggagtggtgtcttgtagtactttgtgtctttcttcatgtttcagatgagtgttttccatagagtggagctcaattcctatttcagatttgagccatcaatgctgggcaatttcttcccaggtaaaatgaaggcaatactaaaatctacctccagatgggactgtgaggaccagatgagatgctgttttaaagccccgagaccccagcacacagtaggtcttcaataggtatcattcccttccctgtcctttctggcaaggagtttagctttgacttattaaggactcataggcaagtcattttttaattgttatgggaggaaaaaatggcattgccttccttgttttactgtggtttgtggaaactcaaaaaaaagcagcgttcggttttacaatctctataaattgaatttcctgtcttttcagaactgtggttctttatactgtatttttgcctcttccacctcccagggctgcatggcatccatttacttctaaaattaaacacatttccattttgtttcaagaatttctgcatctctggagatctatgggatggctctgggctccagattgcagcgatcactgtggagcagcaaccatctctccatcctggctccattgagcttctgcttctgtcatatctgcgctccccattggcactgcccgcctggcgctcacccagtctggtctgacacttgctgctgaggatggggcggggacccaggcaggcttccaattctttcatgagctgggtgctgcctgaagccagtgaactgtgaagccctgttgtaaaggcttcagagggccccagcatggcggggtgggggcaccgagccacgggaagtgtgtgagcaaagagggctgctgagagtaaattagctcctggctttgagtcctgctgatataatctcttgatttttttttttccccactctccaagtaccacttaagtccctctgcttgcttcctcacaaacaatggaaccgaatgttcatttgtttgcttggaactggttgggcatcccccccttctcatttccaaaggcttgaagtgctcagctgtcctctctccagaagccggccccccttggctttagtgtcttctgtgcttaattgcaaattattgatttgaagggaattaatttttagctcttgccagattcagttgctcctgggttggactcctcagtaggacaccctggggatcccggccagggccgggggtgggggagggaccatggcttatcaggggctgctttgggcagaaggccacagactgatcagatgccagggctgtgatcgtctagctcagcatcctgttttatcagagaggaaaccgaggcccagggatcaccaaagcttagccagccacagagagtacagctcccatgtcccagcagggtcatgtctgcaacagtccttgacatgcataggctcatttagttctcacgaaaacctaggaggatgagaacttgttcccatgcagatctgatttagtagatctgggttgacacccgagatttttgcatttcttatttatttatttttaaaataatttcaacttttagatacacggggtacatgtgcaggtttgctacatgggtatattgtgtgatgctgaggtttgggctatggatccgtcacccaggtagtaagcatagtacccaataggtagttggtgagaatgtaaattagacttcacatttctaacaaacaccctccatgggctgccgatgctgcttgtccacaatcacattttgagaagcaaaggtctaaactgcagagctgggtcctaaccttgtcagcacattggaattacctgggggtttaaaaaattactcatgtttggagtctatccctagaaattctgatgtaattgtcgtggagtgccctggacaatgggagtttttgaaacttcatgcaggcagtttttttatttgttatttttacttttaggttcttgctttgttgctcaggctggagtgcagtggcatgattatggctcactgcagcctcaaactcctgggcttaagcaatcctccttcctcagacccctgaaacactgggattacaggcatgagccaccatgtctggtcttccaggctgttcttatgtttagctagaatactttctagctgcccccatctctcccagctttcctatgtacaactctacattcatttccatggaagtgccctcatagaaacccacgcgtatatgtattttgcaacatcagagatcttagaaccaaaggaacaaaataataattacaacatactttgtctcctgagcacttatcttgttatttaaaataacataatgttactcctggtaccgtacatgcactaccgccttcatgtatcacaaaacccctgcacagcaggtgatgctttaatccctgggaaaggtcagctgattccccacttttcagtcagatttggcaccatcacatccactttattcatgaggcatctgagacttaaagatcatcattcccatgtgtcctgtggggccattgccaatccaggctgggtgagggagtgctgggtacattttgtgatttgcaaggcggggcttccggggagcagcagggctgatgcacagcgggagctgacacatcaatgaccagaggaagcagctgcggaaacagaaagcaggaatgtagtgagcaaggcatggggcaatttcattgatctgattcttgggtatgaatttcagccaccaactcagttgtgcaaaatagaattttttctctgcaactgagctggacttagctcttaagctctcttgtgtccatagcaaaaaaacttagttactttcagataaatggtcattaccagattttttttcctctatgcctttgatagaaattctcatttgatcccagctcctttttcttctcttctttttcccttgtacaaaagtgaggttgggtggtgagtgggcttattgtcagggtaatgtgtgtgtgcctgttgtgctggacacctgcatggcttggtcctatgctgggtctcctaaagtcctctgccacccctcagaggctcccgtgagtccctctccatcatccctctcctctgtgaggctctaccaccagtccttcagccagtttgaatagagatagcatttcccatgtgccaggctgcattataagtgctttacatgtataaatgtatcccgttctcatgaaaaacctaagaggtgggtgttattatcatcccattttacagatgaggaccctgggacacagaaaaggggtaagtaatttgctcagggtcacgtggtagagccatgactcaaaatgtcacctggcaccaggacctacgctcttactgatcttacataattgcaatcccaggtgtccagggacaccacagcaatagtgaagggatttgggattttttttttttttttgagacaaagtctcgttcttgtcccccaggctggagtgcaatggcgtgatctcggctcactgcaacctccgcctctcgggttcaagcattctcctgtctcagcctcctgagtagctgggattacaggcgcctgccaccatgcccggctaatgtttgtacttttagtagagatgagtttcaccatgctggccaggctggtctcaaactcctgacctcaggtgatccacccgcctcggcctcccaaagttctgggattacaggcgtgagccagtgcgccctgcctttttttttttttttttttttttttttgagacagagtcttgcccaagctggagtgcaatggcatgaaatctcagctcactgcaacctctgcctcccaagttcaagtgattctcctgcctcagccttccaagtagctgggattacaggcgccagccaccatgcctggttattttttgtatttttagtaggacaggattttgccatgttggccaggctggtctcaaactcctgacctaaggtgatccatctgcctcagcctcccaaagtgctgggattacaggcgtgagccactgtgtctggccagcattagtgaagggatttgattggatgatttcttcataactttcaactctgaccctaaccctaggtgggtcaaaagtgccatgtataactctttcatcttctgtggtttatcacttccactgcattttctcatttcttataccacgggggctgtggtataacatatgcctgtcttccccttattacatcttctaggaggacagactatcctattcactgctgtagctcttgaatggctcatatgttgtagctactcagcaaatcttaaggaacttgaaacattagattgaatagtagcccagagactaggttttcttgatggaagaaaagggagaagggagagaactggaagacaggtggcaggctacgtagaaggcaatggtaggatcaagtccagtgctttttaaaaatttgattcatattaaccttctggtctatagtagtttggaagcagagcactgtaggagcatgtttaaaatttctctattacagcaatggctggagctcccacggccagccttgtgacgtgctcttctccttcagtttcccaaaacaagcataaaaggctctgtacccatcaggtcctgagtgaggaagcgattcactttacagagggttctctgtctccccagtccctccctgctacaattaacacctcaaggagggaatttaaaagcaagtgcttctttttcaattaccacttagaaaactgtgtaataaaacaccactgcaagcctgcttgctctttttgaaagtctaattaattcatttgcagaggttgcgtcttgcctggtactgtgtcacttgctcatttaaaaaggtgccaaggcttggaatcacttgaacaaatccattttcatgtcccatgtttggtggctgacagaacatcataggctgagatggcccagaagcccagggacaacacaaatgtcctttgacccaaaaaattaacctggctttggcttcaccaaccccaccctctaccctgggaggcatgaggcctgggtcaaggccaggtttggtcactcagcagtcactatacttcagtcttttcaccttcacttcctgtacccttaaaaaaaaaaatcttttggccagatgcagtggctcacgcctgtaatcccagcactttgggagaccgaggcaggcagatcatgaggtcagcagtttgagaccaacctgaccaacatagctaaaacctgtctctattaaaaatacaaaaattagctgggtgtggtggcacacgcctgtaatcccagctactgaggaggctgaggcaggaaaatctcttgaacccgggaggtggaggttgtagtgagccgagattgtgccactgcactccagcctgggtgacagagtgagactctgtcttaaaaaaaaaaaaaaaaatctttcccccagctttgatattctaagtcagatcaatttccacctagcaatttgttccccaaatatactgctatctttagtcgattaacctgaaacctactgcaattattgcatttcatctaaaatgtgcctgtttgataaatttttggtgaaaaactatgtaggcacaaatgttacaaaaattctattgattcacaagattgagtctcttctcccttccaaatagttcatgtgtattgacagaattttaaccgagaacctagtatccaattggcattaatttaagggtttaatttttctaacctggccctcctattgcagtatgaaactaatatgtgcacaggggagtagttgcattccctataatatcatctcattgaaattttctccacattatgacacaggctagagatttgttttctactcaagggcacaggatattatggccacatgctgagatgtatggaactggctggctgagcatctagagtgggtcaaggctgtcccatgccagaacatggggccacaggtgaggaagagaagccagaagcccaagaaagtcaatctgagcaacatagggcacaggtgcaaggcaaatctggagatggcaggagccagtaaaggtgagacaaaccgcatgagtcaagaggcaggagagcagtcggagagcagtcaaagaccagaaaaaatgtgggactgaacagtggaaataagaggagtcccagcatatttgcatttacaagaggccagaccaacagctgccagacagatgaacgctattccaagacttctcattgttctttgacctcttcttgctctaggtgcaccaagtgtggcttcaaacaccttcccatcaacatcttctatctagcccttgagaagaacaattgattgaaatctatccacatctaaattatatcatgattctaatatcttagcctagacttcccagaaaacagaactcgaagcaaagcttatgcagtaatgccttacttgggaagtgggcaaagaggtgtgcaatcccagggctgtaagagtgaggaaaatagggaggtaaggcaggaaaagaggaaaggaagcaagctacttagttatatggccccctttgggatagtacaggctatcccaagtactgtgtctcagaacattttttgttattgggaaaaggggagggaaactcattcactggatcctctcctcatcctgactcttgttgaaggttcatccctgtctcagtgttttgttgactgacccctgaactgacttctggggaggcagactgatgtccagtggtgcagtgctacttctgaatctggaagtagatgggatggggagacagagtctctgtgtgtctagacaggttgaacctggggactggagtttttatggttgttgtcatgtgtggcaggtgtgatggaggtcatactatagccaatgctgatgctgaggggctgaggcagccagcggtgccaagagaagaggcaacagtaactgcagtgaggtctctctgcaggatcaaggactggggaatactggaggctgagtgaatatgaggaagcaaaagactagatcacatgcacttatgcagtgaggaatttggggtccaaaatggtggtctgggaggggaagggaattaaccaagatcaaatgtggcttggactaaggaagctgacttaattttagctcattctaaggatatcccagtctttcaaatgataatgttccaatagcagtggaattgtgaggactgactggtctcacttttgttatttaaaaggatctttcagactatctcctggcactggcatgattcactgtcaggaggttgggagtcagttggtctcactgaagcccatttggattggttgattggttaaagcaagatccaatagggtccttacagccctcctgggacatgttactaataggcttgctagctgattccagatcctatcggctattaggaggtgctgagatcctggcaggcttggtacttactgtctcggggactgagtaggctgagttggctactgtctaggagtgaatggagaactttgctagcctcttgacctggagaggtaaagcacctccaccaccactacaatggcaaggttgggttaccccagtattaatgttgggcaagattactgtggaaaggaacattagttggggcaacgtaaactttacttgagcaaatgatgctcccccttactccccacctcctttctttttcttaaaattaactttatcttggaattattttttttaacctagaaataatgaagtgtatataccagaaatgtaaccatctcagaaaactttcagcttctctaccactgagatatgtggatcacaaagtgaggatcctcatatttatttgcctctaaagagaatagggttaagcagttgctgtcttgtagttaaggaatccttatagcagtcaggcagcatgtgacttaactcactttaccagggctagggttctttatggaggtttgaaggcaagtttccagttagaagcgttcatttctcaggctgtattctgaattcacatatcttttgaccatttcaaaatgctgagagtgacaatgcagactttgggtgttctgaactgcgggtcctggtcaaataccatctttctatcacaatgtgatttatagatgtgtaaggataatattttgaactattaaacaatgatttttaattctctccaagtcaatttattccctcagcccctttactattaaaaaggcatcactagggaaagtgaactgctgaaaacagaatcaaactcttggtctttgccatgcaagataaactcttaaagcccctagaagagcagatggtcttgaaagctaaggtttgtttcactgtaagaggtatgtttttttgagagaattaaagtctttttgtataccgagaactacgcataaaatatatctaacagcagttttaaaactttttggtttcaagactcgtttatgcttttaaaaactattgaggaccccacgattttttggggtggaggaggtggtggggtaggttatatataggtacttactttattagaaattaaaagtgatgaacttaaaaaataaaattgcaaaggacaacaaaatatattttcttaaattttcacatgagcatttcaaaataatgattttggaatttcaaaataatgatttattggacaataatgagagattataacagatatagccaaaggtagctggtaaaagttcatttgaagccctgagaaaaagagttaatgtctgaaaacatatttgttcatacagtaaacctacgaccttgaaacattctaaaaaactcaagaaaacaaaacatacattcttttaggtaccagagtaatgacctcatatgtcatgtggtctctggaaacatctattgcatacttctgagaaaatgagagtgaaaaaggcaaatattatctttgtattataaaagtagttttgacattgtggactattacagtacatgttgtgctactatagcagaatacctgagactgggtaatttataataaacagaaatttattttcttaccgttcttgaggctgttaagtccaaggtcaaggtgcaggtatctgctgagggccttcttgatgtattgtcccatggtggaaggccaacaagcaaagaggcaaaggggactgaactgaacttgcttctttataaaggtattaatcgttcttatgagggtagagtcctcatggactaatcacctctccaaggtcccatgtcttaaatactgttacaatggcaattaaatttcaacatcagttttgggtaggacaaacatttgaaccatagcatggacctcccaagggagcctcaggaacccctgggagtccccagtctgcactttgaggactgcttattaataaatagcattctcatatatctcaatttgcctaggatagcccaagtttgtttgctgtccctactaatatagttattacaagcatccctctttactcttaaaagtttgaataaaaattatatggacacactatttacaaactacaggccaaaagtattggcttagccagttttccttcacagatcttgaggaagagaagtttttagagaagaactgagagtagattgaatccctggtgtgccttctgaaagaaaaagccaatggcctagccctgaattgagttccactggggcgaggaagagatgatttttaaaatgtacattatggctgggtatggcagctcaccctgtaatcccagcactttgggaggctgaggcgggcagatcacctggggtcaggagttcgagaccagcctggccaacatggtgaaaccctgtctttactaaaaataaaaaaaagtagccaggcatggtggcacatgcctgtagtcctagttacttgggaggttgaggcaggagaatcacttgaacccaggaggaggaggttgcagtgagccaagatcatgccactgcactccagcctgggcgacagagtgagactctgtctcaaaaaataaaaaaataaaaaaataaaatgcccattgttggttgggtatggtggctcatgcctgtaatcccagcacttttggaggctgaggcaggcagatcgcttgagctcaggagttcaagccagcctaggcaacatggtgaaaccccatctctacaaaacatacaaaagttaggcaggtgcggtggtgtgcatctgtagtcccagctgctcaggagactgagatggaaggattgcttgagccctggaggcagaggttgcagtgagccaagattgtatcactgcactccagcctgggcgacacagtgagaccctgtctccaaaaggcaacaaatgcacatagttaatgagtacagagtttcagtttggcatgatgaaagagttctgggggtgtgtggtggtggtggttgtacaacagtgtaaatgtatctaatgccacagaactgttcacttaaaaatggctaaaatagtaaattatatatatattttattgcaataaataaaatgcacataggtttgagggagtggctccaggagattgtcaatgttgtaaagaagtgctgtgtccactacagtaagagaacaatgggccatcaattgttgagaaaggcaaatggacctgaagtggacagaagactcacagagcccctctgtctcattgagatgatcttgtcagtgctcaggcatggactcttaagttgaaaatcttgctagaagtactgacctcagctgaggatgcattgagtctagaggctgcccatgaaagactaggtgggatgaagtacatctccacagataacagaggagaacagaggacagcctgtgcccgataagcccctcactctgaatgccttgtagacttagtctacttggagttagtccatgagagaaggggaagagcagacccttgaattgaccgtcaaaatcctgaataagccagaaaactctccaatagaaagacaatgtgaggtacattttacatttcctgagagtgacatgaaagtaaaatgaaacatgtgaaattaattttaataatatattttatttgtcccagtatgtctaaaatattatttcaatgtgtaatcaataagaaaaaatgattaatgaaatattttgcattcctgtttgtagtaagtcttagaaatacagtgtgtgttttctacttacagcaattgggactagcacatttcaagagttcattagccacatgtggctagtgactgatgtattggactatgcaagagtagagtttaagccagaaagaatcaaacaacaacaacaacaaaaatttgataggatttacttggacatgattagattgtttttagtcaatgaaatggaagtagaactgatgtgcatttttgccaagggcggaagcatttaattgccagtataagtcactagagcttgcccattcactcatatggtgagtgtggaagcacatgttgaaatggagcctccatcagattgagtcctgagtgattaagatgaacagagccacctaccacccatgttggacacacagtgagagcaagaaatgaatggctgctttatgagatttaggagaggtttgttactgtagcataacttagcttatcctgactgatacatgtgattaaattgtatttcaactaattaaacttttaaatataactttggcaaaaattcatgtcttatatttaaaatattttcagaatttttaaaggctgtgggaaacatgccattcattaatgttccatgaatccatttacctggatatattaatgaattgcataaagggagatatcaaacaaagaagtagaataaaggtaatttttaaagttagcttcaaaaaagaatttcagagctgggcatggtggctcatgcctgtaatcccagcactttgggaagctgaggcaggtggattgcctgagcttaggagttcaagaccaacctgggcaatatggtgaaacctcactctacaaaaaaatacaaaaattagcttggcatggtggtgcacacctgtggtcccagctacatgggaggattgcttgagcctgggaggtagaagttgtagtgagcagagattgtgccacagcactccagcctgggtgacagagtaagaccctgtctcaaaaacaaacaaaaactgaaacaaagcaatttatcaattagtgtctgttgagggatacaagcaggtagaattttaattctgtaatagtaatggcaataaattatttgctcttacaagtattaataatagactattaaggaaaaaatcttgggattgtgagggctcttctctatagattttgaaacattttccacttattttggaaactgatgatttaaacacaagatgttctaggactacagataatctaaatgttccacccatttaaaaaatcataaaggccaattttttagtctccccagaatttgtaattgttagcactagtaatggaacatgtatgtgcccatgtatatttgtttaaatggaacatatatgtgcccatgtatatttgtttaaatggaacatatatgtgtccatgtatatttgtttaaagtgttttgaagctgtgcatagaaacttaactttgcaaggacttgtcattatgaaacacaattagaatttttcataatgagaatttaaaaaactctcatattcctaaacgttcctttcacaggttaaacttttaaattatctatctcattttctttgaaactccctggtgcatgaatattttgaaattaaaataaaatcctaagtgccccctggactgatggaacagacccctcttggccaaggggactccagaaaaactttaaaaactatatttccaggcagtgacaggatggcaagttggtcacacctcagtacaccccccttctttgctatacttttctttttttttttttttttcttcctgagagttaaatagaaaccagccctggaaaagaaacaagactcactcctccacagacttcagcacaccacctgatactgtagcccaactcccatccctttttgtggttttgacatggcaaataaccagtttcacaaagcattcttcccttacaaatggccattgaccatgaactggttctgactggtttacagaagctgcacacgtagtgcctttgtgtcctgagtgtcaccttctaatgtacagagcctatagagcctaattttgctgcattttaatgttaagtcttcactccgtgtgaacatgggatttatgtaacatgtaaatttgcttatcacgcatgtaggtaaccccctttatgtatgtttagccagcctgtttagcataaaactcctgtcccacccttcccttttctatctcagccagtggctctgcttcccagcatgcagattgcagctcttctcagaaattcagaaataaagctgtcctttccaaatttagagatcttgtaacttttcagtaaatagtatacttcttttagggcactgaattgtcttcaattctttcttagtattcaggtagagactaagaaattagtacatttctgaaaaattttttactgtatactgaatactattttccagttggctttagaggaaaatttaatttattgagtgtttttcaaatacttactttatattcaatattgtgcttggtgctgtgaagaaacagtggatgtagaagatgtattactgtcttgaaagaacttatattcttctttttttttttaaattgagacggagtcttgctctgttgctcaggctggagtgcagtcgcgtgaccttggctcattgcaacctccgcctcccgggttcaagcaattcttctgcctcagcctcccaagtagctgggatcacaggcatgtgccaccacacctggctaacttttatattttcagtagagacggagtttcgccgtgttggccaggctggtcttgaactcctgatctcaagtgatccacctgctttggcctcccaaagtgctggcattacaggcgagagctaccatgcccacctagtcttgatgccgacaggcacacagacctgaaatggccaaatgactaaaaggtagcaaaataattaaatgaccaacagaatgagaaaggttgagagccaggatggtgtagggcagggagtactggacagggagcctggagatttgagttgtagttttaactctccaaatgcaataacagtgtatttgtattgaattataaatcaaataaaatgcttttacacattatcttatttaatcctcataacaacactgagaagtggatattattatgatcctcatttaacatgacaacaatatttctttttttttttttttttgagatggagtcttgctctgtcgcccagtctggagtgcagtggcgctatcttggctcactgcaagctccgcctcctgggttcaagtaattatcttgcctcagcctcctgagtagctgggactacaggtgcccgccaccatgcctggctaatttttttttgttgttgtatatttagtagagacagggtttcactgtgttagccaggatggtctcgatctcctgaccttgtgatccacccatctcggcctcccaaagtgctgggattacaggcgtgagccaccatgcccagccaaggacatcaatatttctaatgttttgtagttaatctaccttaaaatacctacttaaaagatagtcctcaaactgagttttacctccaaacctggatcttccaccacaggtgctgtgtgacctgacacaagtcactagacctatctgtatctcaggaatgtaatttatgaaatgaaggctttggcctacatcagcattttccgaagtaacagggaatacttactagttgtgcaggacattaatcagtgacaaatatattggcaaaatgtcaatttaaagtttaattttttaactattaatttcttaatcataattttatgatatattttatattacatattatatattatatattaagtgtatttattataaaataaatgtatttagtaactatgataattatttcttaatcataataatttcctaaaaactttccagaaattctagtatgctaatggacattgttaataattaagagactgtaacacttatagggagtgtctgatctactttttcctaccactttttttttttttttttagcagggagacacaaaccatcttaaaggattgatgtgtctcctgtttagggaatgctgaactaagctatttatttattttgagtcagggcctcactctgttgcccaggctggagtgcagtggtgaaatctcggctcactgcaacttctgcctcctgggctcaagtgatcctcccacctcagcctccctagtacctgggactacaggtatgcaccatcacactgggctaatttttgtgttttttgttacagacgggctttcactatattggccaggctggtctcgaactcctgacctcaggtgatctgcccacctcggctcccaaagtgctgggattacaggcatgagccactgtgcccggcctgaattaagttattttaaggtccttgaatgtatcacattttatgagtctatgtgaataagtggtgtttgaagtcaggaaaagtaatgtcagtggatgggagtaataggggagagctttctagaaagagggtgtagccaggatggaagtccaggctgtgagaaccaatgtcagcaaaggtcaggaatgtttgtctctagaagaaggtattcatggatgagtcagagagcagaaagagagaagactggatctttgggttgggaaaaaaaacatgaaagaccttgaatgccaagtatattggactcttggttaagtggttaagtgattaagtcttcagcttcctttttccaaatgggttacagaaaaccttcttggagaccagactttagcttaaggggtatgcctgattggcgtagggataatatccacccactgctgatagcaagttcaggaatgggtccatgaccccaatgtaggtagatctgtgagtcttcataatatttaaagtccttcccgtggaccccattgatgccaatcttgctgtggacttactttggctaatgaaaatgagcccagggatgggtctggcaatgtcctagataagagttttccttcaatatgggccctagaattagaagataggaaacagaactgcagccaattcacgtcagacatgcgcaacaagcaagagccaaacccttattgtaagtgacagcaactttagcccaataaagaattgaaaggaaaggtctactagatgatttggggaaagtttttttttttttatctttgaaaacacacacacccgtccacccacccacctacacacggggactacatctttcactggaagttactggggaagcatgaagcccttgatttcactgttaggcaacttaaatcatgggaaagaccagccttagcatgaagccaatgctggagagatggaaagaagttagatctttcacagccctgagccattgatcctacttctggatggctcttatatgaatcctgtatttctttttttaaaccaacgtgagttggattttctattacttgttgttgaaaccatcccaattaattcacaaaatgaaacagctagatgtaattttggggttacaggtcactgaagggttttgataaggtagtaataagatacaagcaatgaattaaaaagctgttttggtctgttagggctgctatcacacaatattataaaccgggtatgtcaaacaacagaaatgtatttctcatagttctggaggctgagaagtccaagatcaaagcagctgatttggtgtctgatgagggcccattttctggttcatagatggtgctgtctagctgtgtcctcacatggtaggaagagtgaggaatctcttttataagggcattaatcccattcacaagggctctgtccccatgaccttataaactcccaaaggccccacctcataatactaccaccttggtggtaaggatttcaacatatgaattttggggagatgcaaacattcaggccatagcaaaaggtacatctggcttttgtgaagaaaggttcacaatggatgggaagagataagaagaaagcaggaaggccagtcctagaaaaatggcaccaatccacatagagtgcagtgggagcccagtagggaatgcaatggacaggggagaagtgagggacattctgaagaatgataggactcagtgcctggaggaggagaggaggcttcaaaggcaagagagttggcaggactgtgagaatggtgaggtctggtaggatagggaagaagaaaggaggagtcagttgagaatgaagattatgatttgctctgggacataacaagtttaaacatactatgtggagtctactatgtgggaggtactaaagattttgagaagaataagacctagtccatttcctgtgagactcccaaagcctagaagggaagtagtggcaaacaaatgaattgcaatacagtgattagaacagcaaggtgtagaggcagcacaggggtgagagatccaaggagacatttatccatgttcttatcgagatcagatgggagcttgtgagaagccaggactgtcaaaacccacgtggacctcatttgcagagtagcaatagatactgccatgcaagagatgaatctccaagagtgacaagatgcagtgggagtggaacagagcaaaagtgaaggcagatttaggttggtggctttatttctgccacttgctggctatgtgaatttgggcttgttatttgtgatgtgaagcttcaatttcttccttcataaaggggaaaaaaagtggctacctccttgctttgttgcaaaaattaaatgatataactcatgtgaagtactttgtaccatatctataatttgataactgcttacagaatgttagctttattatctttattatcatcattactgttagtagtatatattgctgcataaaaaactgcctcagtgcaactatttacttattcatgaatctgcaatttggtcaggggttggtaggaatgactcattcctgttccatgatgtcagcccacatggctgaaaagggactggaggattcacttccacgactggcaagttagtgctggatttgggtgggtgcttggctggggtcctaagttccttcgtatgtgggtccctccatgagcctgcttttgcttccctatggcatgatggggatgaggattctaaagataggaagtagaagctgtcaaattttaaggccaacaaccagaaactggtgcaggattactgctgccatattttattggccaatcagtcacaagcccacccagatccacaggaggaggacatggacctcacctctcagtagggaggatttgtggccatctttcatctaccatgtaatggaataaaaaaataaacttagagaaagcctaccatcaggaagcagaggtagagtcaaagacatattcttttaaaaaagtgattgagggattaaatagcaaagctctatacatttaaaaggaactctgccatgccattccattaataaggatcaaatttgattaaatgtagaagcagatgactactgccttttaaagtttaacagaagagcgaggagatctggttaaataatggaaccagagaccttagatctgaaaggacctcagagaccctctgatgcaggcctttgtgtaatcattggaggtgaaactggcccagttgtcccatagaactaatgtttacggtttctttgaataaacgtagaaattggccctcccagtcttaaaacttgagaaagctacatttgccttatctgagttcctttctcaggaaaccaaccatcagggctttcagatagtatcaaggagctgaaacttactgaaatcactgcatctggacaataagacaccagacttctcacccttcatgattgcctaaccgaccacctgcttcccattgaacagcttctcttcctttcctgcccacccccaccacccccaccccccaccaaattcctgtttttccatatatggttacatttcttctctgctatataaactcctaattttagttggtcagggagatggatttgagacctatctcccatatccttggctgtggcaccggattaaagccttcttccctggcaatactcatctcagtgattggctttctgtgtggtgaacagcaggatgtagaccaaatccctggtgtttcaataacaggagcagaatctactcttgccagaaaggtttgtgagagaacccacagctaggggatggagagtatttcagtgggacatttgtgtctacctagacagtcacattccgtagtgtaacagtctttctctggttatcctctcttggagggagggagaacaagtgaaaacagtttcctcaaaggaagacatcaactgcagtttaattcatccaaatatatcagcttctaaagtatctatctgctattcctcaccaaacactctttagtgcaaaacataatatttcaaacatggcttgtttgtctaatgtaagacagcactttctaagctggtttgtcagatccccaagattttgcactaggaagatatgtaactctgtcctcttgcatggatctggctttctagctcagggcaaaaatgaagtgcaattttttttttttagtggattatttatttaaagagtactgaataagtagttgggagaccaaggttctgatctgaggcttagccttgactatctcctacctgcatcagtgaggcaaataggtttctggagaagtgctagaaggttcttcccaattctcgggatcaaagactgtgtgagcaaggtcactggacagaagtgaagagtgacaatgtatcctgcttcctgagagacccaggagtaaaacttatcacaaagagaacacgtttccttaaacacacactgccaagggttcctgggtttccctaaattcttaggacagtatataggaaatacgttgcttgattttaactgtgcagggccaaagtctaatagatcaacacccagtattatgaaaggcatcccagcatctctgcaggcagttcaaggcctttgtttgttatttttcaaataatgttgtgctgctgactcatgtttgtcttgtgccccactgtgaccacctagatattcatggccctaatcacgttccatgttattaataatcagtgcctatgaaattttactactctctggcttgttatcgagtcctggaagtatgcaaatagattaatcaagcagctcctacgctgaaaaccttgaatggaactttaaggatggtggaagtatttgccctggctctcgatgtctcctccaatcaagcctgaggtgtgttttcctcctaacttttaattgcatgacctctgagaacctaatttccagaaaatccatttattattttaatgctcatttggcattattattttcccaaagcaatctttttgtctctgaatctcttaggagagttgagaagcaagccaagaaaagcttcattttctcctcctggccctcaaaggaagcagaaatgaaacattaaaaatcttagtttctagtccgggctggggatggggggaagggaggaggaaaggaaagcagggaagaaagagattggaaggcacttgccttggtcccagatggaaagcaatccagcagattgcctttaaacagcactgtccctgcaaatagggcactctggctgttttgtgtcacttgaaagcatcttgttgatatttttatagattttatgatacattctaaagcatgcatcaggaacagccacttggagttctggcagtaatgaacattgttatactcacagtctgagtagtctttacttcaaagggaggcgttgatctgatctttcatcttctcagctgttgctcaccagcttcctttaaatactgtttgaactaaaaaccccacatttcctggtttcagtgagcaattcccctgatacttctaatcttctcacttggaagctactaaactgtgattgaatgatgccattagcaagaaggaggtaaatacatctaaacgtgctgtcttagactttaataataactagcttgtgtcttcagcactcctgcttgtttacagaaatgggtgtacttgggagagggagaaagaaaaaagaaatgttgaatgaatgagtgagtattttaagcaggcagtttggtttggtgatatgaaaaggtgtctcacacccctctttgtagaatgataaaaagaggaaagaaaagtaaatattctaccctttggaaatagtgaaccagattttccacaaggtaagtaactttggtcaaccttactttaggctactttccatggaggactatttatttaagccaggtaaatggcttgggcactgatccctgaacattgcttattttcttccaccaccaaaagttattcatactatgtgactacttaaatttaaatagagataatttcaaattaaatacaattgaaaatttagttcctcttttgtactaaccacattttgagggctccatgtaaggtggtgtctaccacataggctggtacataaacagacatttccatcatctcagagtcctgtgcgtggagctgctccagagacctataaagtgtttcttgttcttccacaattatgattaaatggactagtcgtgatctttagttcatgacgcattcctatcattgattgatacatgtctcaatatttatttattcattagttttcatcctataaaaacatccataaagccacaactcagaagtagtcaggaccttaaaaataatgtacatctagtcatgtatccacatcccattctgctattccccctcctgagattacttaaccatcatcatggttccaatgttgattcatgcccttgcttttcttttcatgtatattcataacagttcatgtgcatatatgcatatatgtgtgaatgtattcctacacatataatttttgtttttaactttataaaaataatatgctaaatgtaatttgggaggactttgaaatttagcatactatcattatatgttgcagttgtttttttcagatatgtaatatggtacacattgtgtgaacataccacggtttgtttctctaccctctcgttgataggtttttggattacatcaggtttttgttattgtgaacagtgctctcatgagtgttctaatacatatttcctgttgtagatgtgcaagagtttctcttgggtatttatcaaagaatagaattactggttataagatatatgaaggcttaacttcaggagataatgacaaactgttttccatagggaatttgctagtttactcctcaagcaatgtaaaaaagatcttatggatccccattctttccagcactggtttgtcatttttagccagttaaataggtgtaaaatggtatctcctggtggccttgatttgaacttcctaggtcactaatagggttgaacatatcttcaaatgtttatcagttacatccaattctgaaatgcctgttcatgacttttgcccatttttatattgaattgtttgtgctttttaaattgatatgagttctttatatcatcttggtactaatccattgtgtgcattgcaaatatcttctcgattttcaacttattttttatgaggttttggaagaacaagcgtttttagttttagtatagtcaaatttatcactcttttctttatagtcatcctttttttctttttcttttttttttttgagatgcagtcttgctctgtttcccaggctggagtgcagtggcgtgatctcagctcactgcaagctccgtctcctgggttcacgccattctcctgcctcggcctcctgaatagctgggactacaggtgcccactaccacatccagctaattttttgtatttttagtagagatggggtttcactgtgttagccaggttggtgtctcaatctcctgacgtcgtgatccacccgcctcagcctcccaaagtgctgggattacaggtgtgagccactgcgcccagcctatagtcatgcttttttaatgtcttttccaaaaataattttttcatctcaaaagctcttcctcttgtttttttgctaagaaatttaaattttttttttcatttaaatccttcattcatctggagttggtatttggccatgaagtgagatagggttacatttgaatttttttccacataggtaaccccttttccccccagttccacttattgaacaagacttagttttcttcattgatcagacattacacctttgtcctaacccaaagttctgttaattggttgatttctggttctttaagtctgtttcattaatcaatttgtctgtctctgccctaataccatagtcttttaattgccagactttcatagtaggtcctaatagttaaataaagcatttgctcattccttatacttcttatacttcttactcagatgtgtcctggctatttgtggctttctactttttaatatacatgttataatattaccaaattctacttttaaaaaacccactcctcacccaacacagtggtcatttaaattggaaatgcattgaatccacagttcaatttgggagtagtcatttctatggtaaatctccctgtgtaagaacatgttctctctctctctgttttctgcaatatctctcatcttgcacatatttttcttcattagtccttgtattagtatgttttgcattgttatgaaggaatacctgagattgggtaatttataaagaaaagaggtttatttggttcattgtttgcaagctgtataagaagagtggtaccggcatctgcttctagtaagggtctcaggaagctttcaacaatagtagataggtgaagtgggaacaggcatgtcatatggcaagacagggagcaagagaggcagcagtgccatgttcttttaaacagccagatcttatgtgaactaatagagcaagaactcacttatgcaggacaggcaccaagtcattcatgagggatctgcccccatgacccaaatacctgctactaggccccacgtccaatattggaggtcatatttctttatttctttacttttatttttttaatagagacaaggtcttgctatgttgaccaggctggtctcaaactcctgggcttaagcaatccacccacctcagccttccaaagtgctaggattgcagccatgagccaccacaccaggactggagatcagatttcaacatgagatttggaggggacaaatattcaaactgtatcagtatatcagtccttgattttttttttttttttttttttttactctgtttcccaggctggagtgtagtggcatgatcttggctcactgcagtctccccctcccaggttcaagcaattctcctgcctcagcctcttgagtagctgggactacaggcgcacaccaccacacccagctaatttttgtatttttattagagatggggtttcaccacattggccaggctcatctcaaactcctgacctcaggtggtcctcccaccttggcctcccaaagtgctgggattacaggcattgagccaccgtgccaagtctcaattcttgatattctctgaggctattgtaaatgctatcttctctttaattatattttctagttgtttgctaatgtttagaaatagaactaaactttgaatatataaaaatacataagtggccgggcatgttggctgacgccatttgagaccagcctggccaacatggtgaaaccctgtctctactaaaaataccaaaaaattagccaggcgtagtggtagacatctgtaatcccagctactcaggaggctgagacaggagaattgcttgaacttgggaggtggaggttgcagtgagccgagatcacgccattgcactccagcctgggcaacaagagtgaaactctgtctcaattaaaaaaaaaaaaaacataagcatatatacaaacaaaatgaaaacatacatatatatatatatatatatatatatatatatatatatatatttatttatttatttatttaccagccaattttcagcccttccattattttaaataacttttctgtaagttattttgagttttctttgtaaattatcacataatttgtaaataatgaaaattttattttctcttttttaatacttatgactataatttcacatgttttactcttaaaaagctttcttttcacccaatataataatgggcattattttctatgcttaaggactgaagtattacagcaattgtagtaaaaaagtaaaacattatacagctcatgtggaaacagctttctaattttttaagactaagattaggatgcaaatccaacccggaaattgtaaattatcacataatttgtaaataatgaaaattttatttcctcttttttaatccttatgactataatttctttttcatgtcttactatattggctaatatagtctattcaatatttcatagaggtataataaaattactcctgatttgaaagaaaataattctagtgtttcgaaatttagggtgatgtttgctctagggcatttaaaaaacatatctttatctgcttaaagaaattccctcctatttctaagttattaagagtctttattatatatcagtattgaatttcagcaaacacttttatagcatctatcacatacttttttaagctgcaaatgtgatgaattatatttgattttctgttattaaaaccacctgctttggtgtgattaaaccccacttggttatgttctataatcttttacatatactgttgaattcaatttgcaaatatcttggttaggattttctgcatttgtattcaaaggtgaggcaggctagtaatattcctttctcaatgcattagtctgagtttggaataagaattatgctgttttcatagcataatatgagaaatacttcactttattatccttttactgttagaacaagtttgtgtttattgggatgagctgttacttgaaagtttcatggaattgacatacaaaattatctaagcctagtacttttattatgggtaatttttaaccatcatctaatcctttcaataaatatagaatttttaaattttttattttctattgagtcaattctggtaagttaggttcttctatgaatttgtccattttatgtaagtttcaaaatgttggcacatagtagttaatagcatccttaccatatccgtggttatacatgcttgcaataggcaatattgtttatttgaattctctctcttactttcttgctaagttttactaaagattatttgtcttgcttttagtttcaaagattaacttttgacttggttgactagctctgatttttttgtgtgtgtggatgtctatttcatttctactcctactttatcactttctacttcctttgagcttattctgttgttcgtttatataacttctgaagatggacacttatgtcattaattttgaagctttcttcatttccatgaaaattacttaagactatacagttctcttgaagcactagttttgatggatttcttgcttgttgtagtctaattacattgaattcccttcaagactcaggtgaaattttacttcctttatgaagttgtgcttccctgaccatgctagtttgtggccatagatttagtttcacaactctatattgtaataaagtggaataaacacaggtttgaagtcacatagatccaggttaaaccccagctctgccacataatagctgtttgactttctgcataacatgtcatttttcatcttcaaaatagaatagaaaaaagctacatttcagggttttgtaaaatttaaatgtcagttaaccaacatgaagctgatatcagtttctagcacatagtaaatcaatgaactacttttttctctccctacttctcttccttcctcacccatcccttccttcctctcctcccttccttcctccttccttccttcctcccctcccttccttcctcctccttccctttccttccctctcttccttcctccccccccgttccttcctctccttccttcctccccctttcctcccctcccttccttcctcctcctttcctcccctcccttccttcctcctctgctccctccctttctcctctactccctccctttctccccccttcctcccctgttcctttctccctccctttttccctccctcactccttatttccttcattcctgttgaggtttatcacattctaggattgtttttttcctctgatagacactggaaatcatttctgcataaaagctgtgtaatgcaaagtaagtggacatggctagttttcttccccttaattcttgatttaaaggttaagatttttattaagtattgtaaaattgtcctacaaaaatgcagtataaacatacaatttcactactaaagtgtgtaaattccgtttttctatattcttattaatcccaatgattttcatttaaaaacaaaaaattaaaactatttcattgtgaatggccaaaagattgtgttttgatgaattatctttaaaatcgtgtgacttcccaaccagttacatatttccctatgtaatttctacctaaaagtcttgctttttaaaatttatgcataatagttgtacatatttatgaagtacatgtgatatttttatatgtgcatacaatatacaatgatcaaatcagagtatttgggatatgaattacctcaaacatttatcatttcatttcttatgttggcaacataatcttctcttttaactattttgatatatacaagaaattattgttaactatagttaccgtactgtgctatcaaacacagtcctcacttcttctgtcaatgtgtatgtttatacccattaatcaacctatcttcatccccctcttcctttttcccttcctgttctttagaaactatgaatctgctctcaatctttagaagatccacttttttaaagctcctacatatgaacatgtgagtgagaacatgtgatatttctctttctgtgcttggcttatgtcaattaacataataacctccagttctatttatattgctgcaaatgacaagatttccatccttcttatggtgaacaatactccattgtgtgtatatcacatttttaaaaattttatccattgatggacacttaggttgcttttatctcttggctattgtgaatagtgctgcaataaacatgggagtgcagatatctctttgatacactgttttcctttttacttttgatatataaccactggtaggattgctgaatcatgtggtagttctatttttggtttcttaaggaacttccatactgttttccatagtagctgtattaatttccatttccaccaacagtatatgagcattcctctttctctgagtcctgatcatcagcatctgttatcttctttttgataatagcctttctaactggggcgagatatctcactttagttttgatttgcatttccctgatgattagtgatgttgagcatttttttcaatacctgttggccatttgtatgtcgtcttttgagaaatgtccatttagatctcttaccatttaaaaatcagatttttttttttttgttattaagttctttgagctgcttatatgttctggttgtgaatcttgtcagatggatagtaaaagtcttcttttatttatcctccacttacagtttgttcatgtagagtctttacatttcttcttaaatttattcctaagtattttacatttttgttactactctatattgagtctactttttaaaaactttgtttttctgctaattaagaatacatattcatcactgaaaatctaaaacagtgataagttaaataaaaataaaataaatgaaaacacttaatcttaacactcatagataacccctgtggaattcccacatgggctttttcccagctcattccctatgtgcacatggacacactcttgtattcttcacagaatggtttcatgctctacaggaaattgtgtaattctgttggtttagcttgaaatacataaccagtatttttccacggcaaaaaatttttctaactacaacattattcttagaagactaaagaccgtgttttattttatcaacttgcaattattcatggtttttaatgtttgctattataaacaatattgatattttcataacagaagtctttgcatacatttaaaataatttcctgaggaaaaaatcctagaaattgaattgctgtctgtagggtatattattcatttaaggcttaatatactgtcttgctaaattatcattaatagacaggttgctaaattgctctacagaaggccaaatttacatttgcatgagaataatcagttctctgtgccattgtcaggtattggatattgtgcttaaacaaaaaaaagtttaccagtgcctgtagtttagttagtatttattgttacagagagggttgacaatttgtaatcattttatttatttatatttcatttttgtgaacgactcttcatgtcttttgcctatttttaaattaggtttttatctttttctcttttattgaggcatttttatgctataaggacttgaatcctatatttatcatgtatattagaaacatatttctagtattttatatgtaactttattttactttagagatgacgcttttacttacacttttagctgttcagatctattaatttttccttcatggtctttgtatgatgttccatgtccataaaaccttccctatcacaagattgtattaatatgtgaattttcttttcatttttaaaatttaaatatgtatttaggaaacggtatgtaggaatccaagtttgttatcaaattgccccaatatcacttattgaatagtccaggctttcctcactgattttaaatacaccccctacccccgaactcttgattaaacatggcaaattgaacacacacacatttgtctctgcttcctcctgaaagcccaattgcaatggcaataaaaacataaaaaagtgaaacccacagtacaaagaaattgggggaagagattacaggagtagcgggatattagccagcatttttgaaactagaaagctggtggatgagtgggaacccacttagcagatgtgagatgaatgccagcctacaagagggaagccagcatgaagcaagaaggttcaaggattcctactacagaccctgaaaagacctaagaattagaggcagcagatgcctctaatgaaaaaacggtggacagagaattggttgaatatttggatcagaagcaacaaattcctctccttactcagtacagctaggcgactgcccttcagtagcttgagaggagatggaaatgcactttttgcagggtggtttaaccagttgtctctaggtttggcatcaccaagtacaattgagggcagaactgaggcacagtagtgaaaagagaagttctaaatgaaaatttgtgtattgatttgtgagacacctagtccctttcccacttcagctcccagatgggtgaaaaccaatctcaaataacctaagaagaaaggaggaggatttctctctagggaaatgcccatgggaagaagaccttaagatgctgacatttggggacctctcaatgaaaaagctggtttaaagctttattattctgcagagaagtttataatttacacaggtacacaaagcttccaattagcattactgaaaaagtcaggttcattgaagtataatgtgtatgctataaaatatgctctttttagtatgtggttttatgcattttaaaaatacatttatgcaactaccatcacaatcaagatacaaaaatagttcaatgaagcccccaaattactaggtgactcagtgtagcaaattcctaatccctggcaaccactgatttgtttcatctctaaatttttgcctttttataaatgtatgtataatagtttagaaagtagatctttgattgtggcttctttgacattcacccatgttgttgggtatctcaatatcagttcttacctttttagtgtaaagtagaatctcaatgtacaaatacactacagttatttttatccatttaccagttgaaggacattcatgtttttccccatttttgacaattgtaaataaagcaactataaacattgtatacaaatttttatgtgaatgtaaatgaaaatacttttctttttcttggagtgggattgctatgttatatgccatatttatgttaaagctaaagctatcaagctgttttccaaagaggaaatatttcgcatttgcttttccagttgctctttagagcagagatagttgcagttattctgcatcctcaacaactttttttacaaagccactctaataattatttagtgatatctcattgtggtttaatttgcatttccctgatgacataatgatgttgagcatctttcaagtgcttatttgtaatacatatatcttctttggtgagtgcctgctcaaaacttttacctatttcaaaaattgtgttgtttttctcattcagttttgaaaggtattttttctttcatatttgctgtatacaagacatagataggtatttgcaaatattttatctcagtctattgcttgtcttttcatttctcagtgcttttcaaaaagcaaaagcttttaatttttatgaagtccaatttatccctgtttaattttgggattaggctgttggtgtcatatctaagaaatcttcgtctaactcaaaattacaaagattttttttattttgttctagaagtttaatagttttatgttttacacttaagtttatgattgtttttaaagttaatatttgtattggtgtgaggtaggggatgaggttctttttttttttttttttttttttttttttggcacttgaatttctaattgttccagcatcatttgttgaaaaaagactatcctttctccattggcttgtttttgcgctttggttgaaaattgaccacacatatgtgtgtgtgggattatttcaggactctattacattctttttatctatacatttgttttttctctaatacattgtgctaatttttgtagacttataataagtctcaaagtcaagtagtttgagtccttcaaatttattctttttttcctcaaaattattttagattatctcggttcttttgaacttccacataaatgttagaattagcttgctaatttctacccaaaaaatcctgctgggatttttttgagattgcattgagtctacatataaatgttgagaaaactgacattttaacaaattgagtcttccaatcaatgactgatgttatatctctctattaagttaggtcttgatttctttaactggttcagaagtaaacccattattataagtgttgttcagatattctatattcttagtgatgcttctatctaatctgttctgttatagatagagcaatgttgaagtctccaactgtaattatggatttgtctactttctcttttctatagttctatcagtttttgtttcatatattaggaagctctattttaagcacatacacaattatatttgtcatgtactactggagaatttaccccttctttttatgtaattttaaaaaattctatgtaatgtttcttgttataaaatttattttgatgttaaaatagccaacctagtattttaaaattagaattttttttattatactttaagttttagggtacatgtgcacaacatgcaggtttgttacatatgtatacatgtgccatgttggtgtgctgcacccagtaactcgtcatttaacattaggtatatctcttaatgctatcccttccccctcctctcaccccacaacaggccctggtgtgtgatgttccccttcctgtgtccatgtgttctcattgttcagttcccacctatgagtgagaacatgcagtgtttggttttttgtccttgcgatagtttgctgagaatgatggtttccagcttcatccatgtccctacaaaggacatgaactcatccttttttatggctgcatagtattccatggtgtatatgtgccacattttcttaatgcagtccatcattgttggacatttgggttggttccaagtctttgctattgtgaatagtgctgcaataaacatatgtgtgcatgtgtctttatagcagcatgacttataatcctttaggtatatccccattattgggatggctgggtcaaatggtatttctagttctagatccctgaggaattgccacactgacttccacaatggttgaactagtttacagtcccaccaacacagtaaaactgttcctatttctccacatcctctccagcacctgttgtttcctgacttttaatgattgccattctaactggtgtgagatggtatctcattgtggttttgatttgcatttctctgatggccagtgatggtgagcattttttcatgtgtcttttggctgcataaatgtcttcttttgagaagtgtctgttcatatcctttgcccactttttgatggggttgtttgtttttttcttataaatttgtttgagttcattgtagattccggatattagccctttgtcagacgagtaggttgcaaaaattttctcccattctgtaggttgcttgttcactctgatggtagtttcttttgctgtgcagaagctctttagtttaattagatcccatttgtcaatttttgcttttgttgccattgcttttggtgtcttggacatgaagtccttgcccgtgcctatgtcctgaatggtaatgcctaggttttcttctagggtttttatggttttaggtctaacatttaagtcttaaatccatcttgaattaatttttgtataaggtgtgaggaagggatccagtttcagctttctacatatggctagccagttttcccagcaccatttattaaatagggaatcctttccccatttcttgtttttgtcaggtttgtcaaagatcagatagttgtagatatgcggcattgtttctgagggctctgttttgttccattggtctatatctctgttttggtaccagtaccatgctgttttggttactgtagccttgtagtatagtttgaagtcaggtagcgtgatgcctccagctttgttcttttggcttaggattgacttggtgatgtgggctcttttttggttccatatgaactttaaagtagttttttccaattctgtaaagaaagtcattggtagcttgatggggatggcattgaatgtataaattaccttgggcagtatgggcattttcatgatattgattcttcctacccatgagcatggaatgttcttccatttgtttgtatcctcttttatgtcattgaacagtggtttgtagttctccttgaagaggtccttcacgtcccttgaaagttggattcctaggtattttattctctttgaagcaatcgtgaatggtagttcactcatgatttggctctctgtttgtctgttattggtatataagaatgcttgtgatttttgcacattgattttgtatcctgagactttgctgaagttgcctatcagcttaaggagattttgggctgagaaaatggggttttctagatatacaattatgtcatctgcaaacatgacatgattgacttcctgttttcctaattgaataccctttatttccttctcctgtaaaattagaattttcctgatatatcttttcccttccttttaatgtctatataactatagtgtgttttctttagaaagcatcttgctttttgaaaaatccatttcaacaatttgtcttttaattagtgtgtttaggtcatttacattcaatgtaattatatgtttgaattaaaatctatcatcttgattttttttttttttgctgaagataagcaatttcttttagagcaattacaaataggaaatgtcctttcttgcattacttaaaaaaaatactatttctggagatcttcctttttttgttcagaaagaagttttctttcttgtattttatttttgttcttataaaagttctccctgaagaacttcctttaacagtttttgactttgcctgcttgtgatctattttctcaatttttgtctgaaaagaatcttttttaaaaaattctatttttggtttgggggtacatgtgaagatttgttatatagatgaatatgtgtcacaggagtttgttgtttatgttgttacatcatttaggtattaagctcagtactgaataatttttctgctcctcttgctcctccctcaagtagaccccagtgtctgttgtttcctttcttgtgttcataaattcttaccatgtagctgccacttacaagtaagaatatatggtatttagttttctgttcctgcattagtttgctaaggatgatagcttccaactctttgtttctgcaaaagacattatctcattcttttttatggctgaataatattccatggtataaatgtaccacgttttctttattcagtctgtcattgatgggcatttaggttgattccatgtctttgctattgtgaacagtgctgccatgaacattcgtgtgcatgtgtttttatgatagaatgcttcatattcctctgggtatataccaagtaatgggattgctgggtcaaattatagttctgcttttagctctttgaggaattgccatactgctttccacaatggttgaactaatttgcactcccaccaacagcgtataagggttctctcttatccaccacctcaccagcatctgttattttttgactatttagtaatagccattctgactggtgtgagatggtatcttattgtggttttgatttgtatttctttaatgatcagtgatattgacctttttttcatgtgcttgttggctgcatgtatgtcttcttttgagaagtgtctgtttatgtcctttgcccactttttaatggggttatttgtttttctcttgtaaatgtgtttaagttacttataggtgctggatattagacctttgtcagatgagtaaattgcaaattttttctctcattctgtaggttgtctgtttactctgttaattcttttgctgtgcagaagctcttaaatttaattagattctatttgtgaatttttgcttttgttgctatttcttttagtgttttgtcataaagatctttgccctttcctatgcccatgacggtattgccttggttgtcttccagggtttttatagttttgggttttacacttaagtctttaattcatcttgggtgaatttttgtatacagtgtaaggaaagggtccagtttcaatcttctgcatatggccagccagttatcccagcaccatttattgaatagggagtcttttcaccattgtttccttttgtcagctttgtcaaagatcagatagtcatagatgtgcagccttatctttgggctctctattgtgttccgttggtctatgtttttgtaccagtaccatgctgttttggccactgtagccttgtaatatagtttgaaatcgggtaaagtaattccttcggctttgttcttttggcttaggattgctctgactattcaggctctttgttttttgttccatagaaattttaaaataattttttctagttctttgaagaatgtcattggtagtttcataggaatagcattgaatctgtaaattgctttgagtagtataaccatttcactgatattgattctttctatccatgagcatgggatgtatttccatttgtgttttctctgatttctttgagcagtgttttgtaattctcattgtagagatctttcacctccttggctatctgtattcctaggtatcgtatttatttatttatttattttgtggcaattgtgaatgggattgcctttctgatttagctctcagtttggttgtgttggtgtgtaggaatgctagtgatttttgtacattgattttgtatcctgcaactttgctgaagttgtttatcagctgaaagaacttttgggctgagattgtggggttgtgtagatatagaatcataacgtctgcacatagagatagtttgacttcctctctttctttttgggtttatttgtttctttctcttgcctggtggctctggctaagacttccaatactatgttgaatggaagtggtagagagggcattcttgtcttgtgctggttttcaagggaaatgcttccagcttttgcccattcagtataatgttggctgtgggtttgtcatagatggctcttattattttgacatatgtttctttgtatttctctattgatcagtgatactggcccttttttcatgtgcttgttggctgaaagcacatcccataaaggggtgttgaattttatcaaaagccttttctgcatctactgagataatcatttgggttttgtctttagttctgtttatgtaatgaatcacatttattgattttcatgtttgaaccaaccttgcatcctggggataaagcctgcttcatcatggtagattagctttttaatgtgctgctgtatttggtttgcaagtattatgttgaggatttttacatcagtgttcatcaaggatatttatttgaagtttgcttttttttgagatggagtcttgctctgtcacccaggctggagtgcagtggcgtgatcttggctcactgcaagctctgcctcccaggttcacaccattctcttgcctcagcctccccagtagctgggactacaggtgcctgccatcacatctggctaactttttgtatttttagtagagacagcatttcactgtgttagccaggatggtctcaatctcctgacctcgtgatctgcccacctcagcctcccaaagtgctgggattacaggcatgagccactgcacccggcaaagttttctttttttatcgtgtctctgccaggttttggtatcaagttgatgctggcctcataaaatgagttggggagaagtcccttctcaattttttggaatagtgtctttaggaatgttaccagctcttctttgtacatctggtagaattcagctgtgaatccatccagtcctgggctttttttagttggtaggctatttattactgattcagttttggagctcattattggtctgttcagggaatcaatttcttcctggcttagtcttggtagggtgtatatgtccagaaatttatccatcttttctaggttttctagtttgtgtgtgtagaggtgttcatagtagtttctgatggttgtttttatttctgtggggtccgtagtaacactcccttcatcatttctaattgtgtttatttggaacttttttcttcttagtctagtgtcctattcattttttcaaaaaaccaactcctgggtttgttgatctgttgaatgttttttttgtgtctctattttcttcagttcatctctgatttttgttatttgttgtctctgctagtgttggggttgatttgttcttacttctctaattctttccattgtgaagtcaggatgttaatttgagatctttctaactttttgatgtgggcatttagtgctatgattttctctcttaacactgctttagctgtgtcccagagattctggtatgttgtatctttgtatctcactattttcaaagaacttcttgatttctgccttgatttcattatttgcccaaaagtcattcaggagcatgttgtttgattgccatgtaattgtatggttttgagggattttcattgtgttgacttctgtttttattacacagtggtccaagagtgtgtttgctatgattggttctttgacatttgtttaagattgttttgtgtccaattatgtggtcagttttagagtacgtgccatgtggtgatgagtagaatgtatattctgttgtttttgtgtagagacttttgtaaaggtctatcagatccatttggtccaatgctgagtttaggccctgaatatctttgttaatcttctgccttgaagatctgtctaatactgtcagtggagtgttgaagtctcctactattatcatgtgagagtctatgtctgtttgtaggtctctaagaacttgctttatgaatcagggtgctcctgtgatgggtgcatatatatttaggataattaggtcttcttgttgaattgaaccctttactattatgtaatacccttccttgtcttttttgatctttgttggtttgaaatctgttttgtctgagattaggattgcaactcctgcttttttctgttttccatttacttggtaggtttttctccattcctttattctgagcctatgagtgtcattacatgtgagatgggtgtcttgaaggcagcataccattgggtctttattttttatccagcttgctactctgtgccttttaactggggcatttagcctgtttatattcaagattaatattggtaatgtgtgaatttgatcttgtcattgtgctgttagctgattattgtgttggcttgtttgtgtggttgctttacaatgacactgttgtgcgtgtttaagtgtgtttttgattagctggtagcagtctttcctttctgtatttagtgctcctctcaagatattttgtaaggcaggtctggtggtaataaagtcccttaacatttgcttatctgaaaaggatcttatttctccttcacttaggaatcttagtttgggtggatgcaaaattcttggttgaagatttttttctttaagaatgttgaatataggttcccaatccctcctggctggtcgggtttctgctgagagatctgctgttagctgaatggggatccctttgtaggtgacctgccctttctctctagcttcttttaacattctttctttcattttgaccttggaaaatccgatgattatgtgtcttggggatgatcttgtgtagactcttgcaggagttctctgtatttcctgaatttggctgttggcctctttagcaaggttggggaagttttcatggatgatatcctaaaatatatttttcaaatcgcttgctttctccccatccctttaagggatgccagtgattcatagatttggcctctttacataatctcatacttctcagcggttttgttcatacctttttatttttttttttatttttgtctgacttattacagagaaccagtcttccagttctgaagactggtttatttctttcctcagcttggtttattctgctgttaatacctgtgattgcattgtgaaattcttgtattttgttattcagctctgtcagacccattaagttcttttttatactggctattttgtccttcagctcctgtatcactttattgtggttcttattttccttgggttgggttttgccattctccttaatcttgatgatctttgttcctattccatagtctgaattctatttctgtcattccagccagtttggccttgttaaaaactcttgttggagaactggtgtggttgtttggaggacatatgacactctggccatttgagttaccagagttcttgcattgatcctttctcatctttgcatgtgagtgttcatttaactgcaatagagactgagtacagttaatatacttcttttctggttattttcaccaggctgaggctttgtgtagggtctttatttgaagctgacttcttgtgtcttgtttcagagtggggtatgttagtgaggtattttttttttttttttttggtgttgaagctttggggtgtgatccagcaggtgatacttaggcttattagtcagttggtagactcttgcccagttgtgtggctcccctgttgcctcacagttgcagccatgttccctctcagtgctctgaaagtgtgggtttctctcccccttaagtccaggctgtagttcatgacttggcattcctgggctgccgactgcacctctgaagttatctcagtgtttatgtccttccccagcttagaggcagcagaggaagagatcttagtagtccaagcaagagatcaagtgtccaagggtcatttgcttgactcctggggactgcactccagagagacgcaggttagcaatcactcagtgcagtcagcccaagagggagggtttgtgctgtgttcccaagccaggggttccctgtctggtgctaagatgcgggggatgtgaaggtcccatggaagaaggactggccttctctccttgggttaactgcagtttgttggcggcgtgaatgaggcacttagggtctttactcttttgttagtctgagggtgttaagggcaattccactgcagagggagtggcacagaggctttcagttgcccgtagaggctctgtccagggagttgctgagttggtactggaaggacaatataatcttagtctactacataactttgtgaataatatttatattaatataaatagaaaatattgacttaaccagagattgtttaattgctatatgataaggatagagataattgtgcttaaataaatcctcacgttttagagttagaagtcagtagataatgtttaaaatttaaaaaccaaagaataaagatgtaagcttttaatttagaagtataagatcagataataatggcaatacctaaaataatttaaagtggttgcctctaggacatgggaattgggggtatgagcaagggtgaaacatcaggtttcatttgaagtattaaggttttactagaaatttctaattatatggttaaaaattaaatataagattaaaacttttccatatattaagttcttctaaaacatctttgacaaaatttgtggataggaagcctaggtttgaatatagttccacacataacagctgtatgtctgtggatgactgttacttaatctgactgcttctgattccttcttctaaggtgaagataaaaatagtacccacctcacagcattgcaatgagataaagttagtaaatgcatgtaaaacacttagtgcatggaacaaagaaagcaactgttaaatgctggctattactatcttattccagcagtagttcctataatggcctaattagtatgactttatattgtatttaatttgtaatacaaatgtttgtattaaatacaatataaagccatactaatttcctttgtttgctaaattctacttccttttttttttgctaaattccatgatttttttcttctaaataaacttaagaatcattttctcttccccaacaaatatattttatctctacatttattcaagttttcttttatgtccagggggaatgactatggctttctttatcaaagtctgcacatttctcgttaaatttatttataggattgtgagtgtatttgggtctctaaatctctttctcttattaaataaagttctaggtctagttttatatttatgcagccttgcatatgagatcttatttttaagattttatttttttgggggatacatatttattttattttattttattttattttttattattattactattattattattttttttaattatactttaagttttagggtacatgtgcacattgtgcaggttagttacatatgtatacatgtgccatgctggtgtgctgcacccactaactcgtcatctagcattaggtatacctcccaatgctatccctccctccgcccccctccccaccacagtccccagagtgtgatattccccttcctgtgtccatgtgatctcattgttcagttcccacctatgagtgagaatatgcggtgtttgtttttttgttcttgcgatagtttactgagaatgatggtttccaatttcatccatgtccctacaaaggacatgaactcatcattttttatggctgcatagtattccatggtgtatatgtgccacattttcttaatccagtctatcattgttggacatttgggttggttccaagtctttgctattgtgaataatgccgcaataaacatacgtgtgcatgtgtctttatagcagcatgatttatagtcatttgggtatatacccagtaatgggatggctgggtcaaatggtatttctagttctagatccctgaggaatcgccacactgacttccacaatggttgaactagtttacagtcccaccaacagtgtaaaagtgttcctatttctccacatcctctccagcacctgttgtttcctgactttttaatgattgccattctaactggtgtgagatgatatctcatagtgggtttgatttgcatttctctgatggccagtgatgatgagcatttttttcatgtgttttttggctgcataaatgtcttcttttgagaagtgtctgttcatgtccctcgcccactttttgatggggttgtttgtttttttcttgtaaatttgtttgagttcattgtagattctggatattagccctttgtcagatatgtaggttgcgaaaattttctcccatgttgtaggttgcctgttcactctgatggtagtttcttttgctgtgcagaagctctttagtttaattagatcccatttgtcaattttggcttaggttgccattgcttttggtgttttggacatgaagtccttgcccacgcctatgtcctgaatggtaatgcctaggttttcttctagggtttttatggttttaggtctaacgtttaaatctttaatccatcttgaattgatttttgtataaggtgtaaggaagggatccagcttcagctttctacatatggctagccagttttcccagcaccatttattaaatagggaatcctttccccattgcttgtttttctcaggtttgtcaaagatcagatagttgtaggtaagcggcgttatttcggagggctctgttctgttccattgatctatatctctgttttggtaccagtaccatgctgttttggttactgtagccttgtagtatagtttgaagtcaggtagtgtgatgcctccagctttgttcttttggcttaggattgacttggcgatgcgggctcttttttggttccatatgaactttaaagtagttttttccaattctgtaaagaaagtcattggtagcttgatggggatggcattgaatctgtaaattaccttgggcagtatggccattttcacgatattgattcttcctacccatgagcatggaatgttcttccatttgtttgtatcctcttttatttccttgagcagtggtttgtagttctccttgaagaggtccttcacatcccttgtaagttggattcctaggtattttattctctttgaagcaattgtgaatgggagttcactcatgatttggctctctgtttgtctcttgttggtgtataggaatgcttgtgatttttgtacattgattttgtatcctgagactttgctgaagttgcttatcagctgaaggagattttgggctgagacgctggggttttctagataaacaatcatgtcgtctgcaaacagggacaatttgacttcctcttttcctaattgaataccctttatttccttctcctgcctcattgccctggccagaacttccaacactatgttgaataggagcggtgagagagggcatccctgtgttgtgccagttttcaaagggaatgcttccagtttttgcccattcagtatgatattggctgtgggtttgtcatagatagctcttattattttgaaatacgtcccatcaatacctaatttattgagagtttttagcatgaagtgttgttgaattttgtcaaaggctttttctgcatctattgagataatcatgtggtttttgtctttggctctgtttatatgctggattacatttattgatttgcgtatattgaaccagccttgcatcccagggatgaagcccacttgatcatggtggataagctttttgatgtgctgctggatttggtttgccagtattttattgaggatttttgcatcaatgttcatcaaggatattggtctaaaattctcttttttggttgtgtctctgcccggctttggtatcagaatgatgctggcctcataaaatgagttaggattccctctttttctattgattggaatagtttcagaaggaatggtaccagttcctccttgtacctctggtagaattcggctgtgaatccatctggtcctggactctttttggttggtaaactattgattattgccacaatttcagctcctgttattggtctattcagagattgaacttcttcctggtttagtcttgggagagtgtatgtgtcaaggaatgtatccatttcttctagattttctagtttatttgcatagaggtgtttgtagtattctctgatggtagtttgtatttctttgggatcggtggtgatatcccctttatcattttttattgtgtctatttgattcttctctctttttttctttattagtcttgctagcagtctatcacttttgctgatcctttcaaaaaaccagcccctggattcattgattttttgaagggttttttgtgtctctatttccttcagttctgctctgattttagttatttcttgccttctgctagcttttgaatgtgtttgctcttgcttttctagttcttttaattgtgatgttagggtgtcaattttggatcttttctgctttctcttgtgggcatttagtgctataaatttccctctacacactgctttgaatgcatcccagggattctggtatgttgtgtctttgttctcgttggtttcaaagaacatctttatttctgccttcatttcgttatgtacccagtagtcattcaggagcaggttgttcagtttccatgtagttgagcggctttgagtgagattcttaatcctgagttctagtttgattgcactgtggtctgagagacagtttgttataatttctgttcttttacatttgctgaggagagctttacttccaagtatgtggtcagttttggaataggtgtggtgtggtgctgaaaaaaatgtatattctgttgatttgggttggagagttctgtagatgtctattaggtctgcttggtgcagagctgagttcaattcctaggtatccttgttgactttctgtctcgttgatctgtctaatgttgacagtggggtgttaaagtctcccattattaatgtgtgggagtctaagtctctttgtaggtcactcaggacttgctttatgaatctgggtgctcctgtattgggtgcatatatatttaggatagttagctcctcttgttgaattgatccctttaccattatgtaatggccttctttgtctcttttgatgtttgttggtttaaagtctgttttatcagagactaggattgcaacccctgcctttttttgttttccatttgcttggtagatcttcctccatccttttattttgagcctatgtgtgtctctgcacgtgagatgggtttcctgaatacagcacactgatgggtcttgactctttatccaacttgccagtctgtgtcttttaattagagaatttagtccatttacatttaaagttaatattgttatgtgtgaatttgatcctgtcattatgatgttagctggttattttgctcattagttgatgcggtttcttcctagtctcgatggtctttacattttggcatgattttgcagcggctggtacctgttgttcctttccatgtttagcgcttccttcaggagctcttttagggcaggcctggtggtgacaaaatctctcagcatttgcttgtctgtaaagtattttatttctccttcacttatgaagcttagtttggctggatatgaaattctgggttgacaattcttttctttaagaatgttgaatattggcccccagtctcttctggcttgtagggtttctgccaagagatccgctgttagtctgatgggcttccctttgagggtaacccgacctttctctctggctgtccttaacattttttccttcatttcaactttggtgaatctgacaattatgtgtcttggagttgctcttctcgaggagtatctttgtggcgttctctgtatttcctgaatctgaatgttggcctgccttgctagattggggaagttctcctggataatatcctgcagagtgttttccaacgtggttccattctccgcatcactttcaggtacaccaatcagacgtagatttggtcttttcacatagtcccatatttcttggaggctttgctcatttctttttattcttttttctctaaacttcccttcttgcttcatttcattcatttcatcttccattgctgataccctttcttccagttgatcgcatcggttcctgaggcttctgcattcttcacgtagttctcgagccttggttttcagctccatcagctcctttaagcacttctctgtattggttattctagttatacattcttctaaatttttttcaaagttttcaacttctttgcctttggtttgaatgtcctcccgtagctcagagtaatttgattgtctgaagccttcctctctcagctcgtcaaaatcattctccatccagctttgttccgttgctggtgaggaactgcgttcctttggaggaggagaggtgctctgcgttttagagtttccagtttttctgttctgttttttccccatctttgtggttttatctacttttggtctttgatgatggtgatgtacagatgggttttcagtgtggatgtcctttctgtttgttagttttccttctaacagacaggaccctcggctgcaggtctgttggaataccctgccgtgtgaggtgtcagtgtgcccctgctggggggtgcctcccagttaggctgctcgggggtcaggggtcagggacccacttgaggaggcagtctgcccattctcagatctccagctgtgtgctgggagaaccactgctctcttcaaatctgtcagacagggacatttaagtctgcagaggttactgctgtctttttgtttgtctgtgccctgcccccagaggtggagcctacagaggcaggcaggcctccttgagctgtggtgggctccacccagtttgagcttcccggctgctttgtttacctaagcaagcctgggcaatggtgggcacccctcccccagcctcgctgccgccttgcagtttgatctcagactgctgtgctagcaatcagcgagattccgtgggcgtaggaccctccgagccaggtgtgggtgcgccgttttttaagccggtctgaaaagtgcaatattcgggtgggagtgacccgattttccaggtgcgtccgtcacccctttctttgactcggaaagggaactccctgaccccttgcgcttcccaggtgaggcaatgcctcgccctgcttcggctcgcgcatggtgcgcacacccactggcatgcgcccactgtctggcactccctagtgagatgaacccggtacctcagatggaaatgcagaaatcacccgtcttctgcgtcgctcacgctgggagctgtagaccggagctgttcctattcggccatcttggctcctcccccctttaatattttctttacatctatttgtatataggaacaatcttaacttttgccatcttattttttaaagcaacacttttctgaatttatcagttttaatatttcagttgttattctttttcttttatacaaccataatatctgcaaattatggtattttctttttttaatatacgactaattttcttttttcttcctttcctttctgcttttatggtatatgaaagttgaacttttatttattattactttgatcttgtgatttcccattattttgtttttagtcttttggtttatggtacgttttctttatttttatttttctagtgttttatgtcacatttttatttaaatagtaatagcaataataattatgaattaatatgatcataatagccgtttattagaaacttgcatgtacctggagatgtattaggcacattacatgcttttcaataatactaatattactactactccagcaacaacatagcaacaattgctaaacaatattgaacattttctacgtgctaaacatgttttaggtgctttacatgcattatctaatttagttctttaactgtgtgaaatagttggtattattgtcctagtaaaatcctatgaggcatgtacaattatctactttacagaagagaaaatgtgattcttgggtataacatcaatacctaacagtaatacattgtctctcatacttttaatgttttgaaaatcatttttctgtaatttctttatttttgaaacccaatttctttttcttcttccttctcttcttttcttccttcctcctccttctccttctctcatcttcctcctctttcttctccctcctctttctcttcctcttcctatccttcatcctcctcttcctactcttcctcctcctcttccatattcttcatccatggccacttttgctcatattctttcatctttattgtaagcagtttcactctgcattgctttctccttttccttcttcaaagaccagtagtgcaacatctattatgttcacatagtaatataatagaaaaggaaggaagaaaagaagaggaaaaaaaaggaaagaaaaggtgagggaagaaaatctttccaagacactgatttcaggttattcccagtgacaattttcttctttattccaagatcagggctaattcctcttgcaagggcttgggggcaggcagtggagataggtgcacattcagtatccagggtgtaacagttcctacacagggtggctcctctttgggttcaggtgcaagagaacagccacagatggtgcagaccattacttgctacccttaggcagcacagcccatcccccattgttcccggagatgaagtagttagatcaagccaatgacaaagggattttctctaagcactaattaggctctgagtattttccagtctaactccaatttcaaccatatgtatatacagatgcagtttatacttttcctcctttgccacgtcattcttacatgcttttgccacccatccacaactcctgcatcctttttattctattcttcaatttccttccacaaaaaaattttaatattaacttgaaacttcaaggctgacaacttttgggatcctgcatgttctcctacactactacatggggctgtcaggaaccatcactaaagttgggattaaaactcagaatctctttctttctggaatgaaaataaacaaatacagatgcagtggaggcaggtgttgcatagcctgctgactctgttgtgttattatttacttttagtattttttcattatttgattttttgtttgtttgtttttttttgtttgtttgttttttgaggcagattcttgctttgtcacccagggtagagtgcagtggtgttatcatggctcactgtagcctgtctcctgagcccaagcaatcctcccaccctagtctcccgagtagctgggaccaccatgcctggctcattttaaatttttttgtagagaagggatctcactgtgttgcccaggccaatcttgaactcctgggctcaaatgatcttcttgacttggcctcccaacgtgctgggattacaagtgtgagccaccaggcccagactcttcatttgtttcttaaaatattttctcaaagtgacctacaaagaacacctttttgttatcttgagcactttactttatcagagtctgctctaggttgtccgaggggccctttctcttagtcctattcttttcatatcagtggccttcttgggttgtgtatttctttagatgactgcacttgtctttctatttgacatcagccatgattgtattgtcgtaattttactttggtaatttctggttcttatttttctctgtccatgggttgactcctctttttactttttctttaatatatttccaaaaatttgtttcttgaattgcatagcccatactaaccttgcacccattctcttcccagtgggcatgaattccaagaacactgcagtattctcctgtagactctccttgtttccacatccactgtcaatttgtattaattaaggccagtgtggtcgttatctgtggggccaaggaacatgatggctttggagcctataggtcaaggttaaaaccttggctctacttcttgctggctgtgtagttttgaaaacattactcagcctgcctaaatctcaggttcctgatgtttaaaaatggagagaataacagctaccttgtgagattattgtgaggattagaggtcattctgcaaattacctggtgtgtgataggtgtacagtaaaagaaaattacttttgagccactcaaagatgagattcaaatccaagttcttccactaactataactttttttcccttaagtttaccactttttgagtctcaattttcttatctgtaaaatgggggggaaaaaagtccatatcttatagcattcctaggaagactatagcttctggcatggtataaggcagtggtacatgctctcgttgaaaattgctctcttggatgggcacggtggctcacgcctataatcccagcactttgggaggctgaggggtggcagatcacttgaggtcaggagttcaagaccagcctggccaacatggtgaaaccctatctcaaccaaaagtacaaaaattagctgggcatggtggtgggtgcctgtaatcacagctacttggtggactgaggcatgagaatcacttgaacccaggaggtggaggttgcagtgagtgtagatcgtgccactgcactccagcctgagtgacagagagagactctgtctccaaaaaaaaaaaaaaaaaaaaagtgctctcttatgccttctgaacaaagacatgccctgctggacacatctgagctttacctgacatgccttttcttttttctttttctttttttctttttttttttaacagaataaagctttcagtaggtatcacactagcctgaaggctttgctttagctcagtagagtccttgttttgatatctcgggtaagcagtactcatttgttccttctgatcaacagaaatgttttcataaacattttatttctgattttttctttctgcatggctgtgtatatcctttaacctcagggtatcattcaaaaaggaaggagaagagaaaaagaaaaatggaagaaagaaagcaagagaaagaaatggacaacttactgaaggggacactttcagatattgcagaaaacaagagagtcataggcaatctcattataatcaggaaacatgtatgcagcttgatgagctcatttttcacagtttgctagaagaaaaatttttaaccttaatcattttttcaaggatttggaaaatgctcagtaaaagggaagcagaaaattggggaaactattgcttacactagaatataaacaaagattctttgctcctcacagggctctgaagaagaaatgatcttggaatgtgaatttcatcccatcctttgtaatcctgcaggaatgcttccatatctgatgagctattttaaagttgtgggtgtgggctattttaaatctgacatgccttgatttgaatccaagctctgccatttactatcaacaatgcattaaacctctgcatgcctcagtttctgtaggcatttaaaaaagggcagcctagttttttcttcatatagtttttagcaggagcaaataatgtaattgatgtatgctgtagcaattagcacaattcattgcatggaatagataataaatgttagtgctccatctctttttcctggaggcctatccagtagtgtgaacttgattatcatagatgatcaatacgagtaaataatgggacctgatggaagaatgtatcagtgaaattaatctcattttcactagtataaatcaatttgaagaagcatctgctcttgagaggagcagaaatgacagaattgttttaatacatggcataacttgattttaattttgatgaggaaaataagaatcccacctggttatgattattgattaaaaataactgctaccatttgtggacttagtgtgaaccaggtgcttgccttttaaggaagatattatgtatattggacagatgaggaaactaaggctcagggcagagaagagacgttctcaaggttacacagctaatgagaagaagaatcagaatttgaatatacaccgtttcttttggtgtgtgaggttttgtactgcatgacaacagagacagaccattactcccaacatgtacattatttgtctcacaatataattgaatccagtataacacttaagaaaattcttggctcagtacagtggctcatgcctgtattcccagcactttgagaggccgaggtgggaggattgcttgagcccaggagcttgagaccagcctgggcagcatagagaaaccctgtctctacaaaagcaaaaattagccaggcatgatggtacacatctgtagtcccagctactcatgagactgaggtgggaggatcacctgaaccaggggaaatagaggctgcagtaagccatgattgcaaaactgcactacagcctgggcaacagagtaagattctgtcttaaaaaaaaatatatatatatatgtatatatgtataattttcatatattccctggaaaacatcaacaatcttggggtaaggtaattttatttctatccagtttccatgtgtaagtcagtttcattaagtttatctagatcagtgatcagtgtcctaccactggatgtaagaaagagtcattctaacaaatgaggccagccagtgactgaggcgtcaagactatgtatttactgacaagtcagggaagtaggagatatgctttcttcttttagagttttgatactctcaaagggaagtgaactaaccttcaaagtatacctggaatgtaaccaaaactattaatacaaatagaagcataaaattcatcctctcatttaatacaacaatgggtgagacaaacattatcatctctattttatagtggagaaatggaggctttgaaaggttaagtaacttatgtaaggtaagaagtacagctaggtttggagccccagaaaatacaatcatactgaagagctcattccatgatgatgctcataaatgaagtgttgcagctctttgctctaatttcttacttatcttgacaaggaaagcattcatcatttttcctagtggtgtcttggcccatctcagggtcaggctgtctttcaattaagtaatgtacaaattgaggagcacacagccagaacatcttcagcagagccctcactccacacactcagagttggcgggggtgggtggatagagaagcgagaaggtggatgggaataatggaaaatgatgtgatgttgtggaaatgtagattttgagatgatttttaatcaagtcagccaggagaacctctcttcaggtgtaagcaagatgtaatcaataactgtacccggccctcttgtcttccatgtgattttattgaacacaggtttaattgacctgaaaaagaaacgtacttgtttggaaaggtgtgtgtactgccagcaaaataaaacttcctcagttcctgccatgtatgggggtgttgctggactgttttacatgatcacttctgacagtagaaatctgtcaggtcaccacattgtaaatgctttggaagcaacagtccacgaggccattttgataatgagagaaagtataaaatgtggtgaggatttccttttacttggcttgctcattccagaaattgacttggattgattaccatggaaagactctactgcatctgtgctccagaggggcaaagtgacacaaagggacgaggcttgtacagtaaaattttagctcccttgacgtgatacagtccacgaggatcctatctcaagggagtacactagaagtgattgctcaaggaaaacccccatctgtttgtagaatcccggctatgcattttgtctttatgcaccttggttccatcatctgtgaaataaaaataagccctaccttgttggaatgttacaaaggcaattagcaactcaaaagaaatttagtcagtgatttcccactggtacccttctgtgcacttaataatatgttggtgacctgaaaaatctttcttgagacccatgttttttatatgtagaatgagattgagccagattatcactaacttccttcccaaccctaccaccaaataacagcacttctaccgacatcctaggagtaaggcaatcttgaatttataaaatattctcaggctcagagagccgttttagaaatcagccatgacacaaggaaaggaccttgagttaggagagctggactcaagtttcacttcagccacattcttgtcatccctaagcctgaatgtcttcctctacaaaattaggataataatttcctcctctacagacttattgtacaacacatagtccatacatctgcttccttttgtcactgatgtcctcttccccagaggcaaccacttacaactgaatttttattttttgtgatatttagctccatatatctaaatagctacccatagtgccatttcttgacttcttagttttaggcattatatgacctacccattaaggaagatgagatcttagccatttcatccccatcactctactagtagcaaaagcatgcacagttattcatgtttccattctcccaaaataaatatatattttggctagatctatcatcagtgcttaaattgagtacataaatactgttcacagctgagccacatagaatactattattttttcctttcttgaacaagcatttgttttccctagatttactaagtgttttgttttgttgatgtactgcgttttctatggtcttatctctgattcagcctcaaattctctttcaatatgtctcaatgcattaagtatttttagcaattgtatctacttggaaacattactgcagaaaccttcttctctatttagttagttcctgaccgttggttgcaagcctattgttagctgccttcctggggctattctttgttgtattctaggggtttcttttattatataacacctctctcatattgaattcctcattacgtaagcccagtgtctacatctttattagctgatcttcttgttttaaaaacggagcaacttttctagtacccttcagtaaacgtgtatatgttgagaacttacatatctgaaaacatattcagcttatctttatcctgagttaatagtttgatcagttatagagtttaggttggaaaaaatttttccttattattttgatggcattcctccagtcttagtgttaaaatgtccagggccattctggcccgtgaatactcctgatttttctttttagaagcttttaagatcttctgtttttcccagtgttctaaaacttcacggtggtgtgatcacaaaaataaatgttttatttattgtgctagtgctgggattaaacatattctccagtcctgagattcagtgagccacctcttggtagctacttttaactgagtagtttaacgttcttcttccatgatactgaagacacacttcttttaacagctgttatgacattgttttttagttagttgtgtatatctataccatatagcattacaggccccattatggaaacccaatggagttctgttgtataaatgaaaaacaattacttatgatcttctgcctgcatgggcatagaagcaaaatatgtaatatgaatgtgaaaaattaataaattatattgaatttttaaaacataccactacagagaattcacagtttgctatacattctgtagctttttgtaatccatgagttagtcatcaacaggaacaaattctgaactgccttttgtaaccacttgaaacttgaaaggagagaaataaaaatggtttgaggttctggaggtttctaaataccttcaaaaccccattgtttgtgacagtcaggatgtttatgatcaaggaaaaagggaagtgttctggagacatgccctatttccatatttgtggtgcccaaaacaaagataaaagtggtggcccacatatgtctaaatagttacaatttataacccaagctttaaaaatattaaacaaaatttgccctagcagatttggaaggctaggttgcattttagagttctgggatttcttggcagccctggaagaaccaaccctcagccaccaacttggctctcttatctccttaccttcccccagatatttctggtctttgtggcaccctgtttgcacatatacagacacattaacatgatagccacatggccaagctccattcacatgctctgcaaataactgccctttgaccaccccttggggaaaggataagggcattggtgagtcagttaccacttgggaggacagtcatgggtcagaggctgtacatgccctggaagtgaatgaggggccatttgggaaaggaattcccatggagagtaggcatgtcaccttggctctggggactcctccacaggacaagggccagaaaggactccgccaagtgcagagtacagggcacagtcacctcgtgactgaggctgaaggtgagactcccagagagtaagagaaacctgactgtgatcctttggtcaacttatggcaaatctgagaaggaaacccaggttgttctaaaggattgctttggcgtctaactgcctccccacctccatgagcaattccattaaccaaaaaggaaggaactgagcaagttcagtcctcttacttttattttacattttaaaaaatagcgatggaacatgatccttcttgataacttatactggtccagcctagaccataaatcagaaagtaaatgtcttgtggtttgaggtaaggcctaagctgacgttatcctcccttttatgaagcctcagaggctcataggcccagatttagtctcggtggtttgcatattaaaaactggtttctttctctgggttttatgttaccacttcaaattcctctagacaagaaataagggaaatggtgggaaagctcaaagtacaaagggtacccacccagggctccaggaaggaccctcagtgagactttggaagctcaaaatacctttgcttctgatagacagacttatgaacctggaagaagttaaattttttatttcaaaaactttctaaataacagtgtcttaaatttaaagtccttcctccctcaccccacctctagctgattttgttttgcttcaatattcataaagcacctgtaattgtttacatttcttctactcttttttgcaaggccccaggaatgcaaagggaaaacacaccaacataggcaagccttggggtaatttttaaatagtcactgctctttcaatgcatggtgttgggtcattgcttaataaacaatattctttctcaactcctactccagctccatttccatatactttacattaagactggaaataaatcaactgctaatagtttagctcccagggtgagtgggatgctgggtcaggatgttctctctcaatgggaacaaagggtcagccaggcaacagcctgaatgttgaagtcttgtttccttgcctctttctagcagttcagattttgggttgggtcttagaatctgtttctcctagttgctccggtgtgtacttggcatctcatggtgattgactctatctgatcttggcctgcactccccttacccactcagctctgccttcacacccatatccatcccattaactggcttgttcctgccctttggtagccatggtagtgggacagcccaccgcacactgctcagattggtggctgagaaaggacattgcccacctctatgttagaataaggaaatgttttctttttcagtttttaagttcagggggtacatgtgcaggtttgttacatgggtacattgcatgacaccaaggtttggggtatgaatgatcccattgcccaagtagtgagcatagtacccaataggtagtttttcaaccctctcccctctcctccatctagtaattcccagtgtctgttgttcccatctttgtcttcatgtggaccccgtgtttagctcccacttacaagcgagaacatacagtatatggttttctgttcctgtgttaattcgcctaggataatggcttccagctgcatctatgttgctgccaaggacatgattttgttctttttttatggctgcatagtattccgtggtatatatgtaccacattttctttatgcagtccaccattattgggcacctgggttaattccatatctttgcaattgtgaatagtgctacaatgaacatatgagtccttgtgtctttttggtagaaggattttctttgggtatacacccagtcacgggattcctgggtcaaatggtagttctgttttaagttctttgagaaatctccaaactgttttccacagtggctaaactaattcacattcctgtcaacagtgtataagcattcttgagaataaggaaatgtcttcacctttcaattcattacctgcaggatcatctcatacctatcaattcttattgcctcctccagagttgtcttctttttgtaaaatttgattgcactatcataaggagttactatagagacctgaggctttttaaaaagcaaatatagcagcactcacaaattgccattggctttgttctttggtgtcctttctttgtgaagccaagtgttcacttcaacgatgctgctttgctcaatactttttaggaattacttctttttggagctgcctcaagagctagttctccgttgctatttctaagcaattgaaattccttgaaagaagaaaaacaaacattgctaagggtgttccagaaaggaattttatatatgtatagttcaagcacgacattagctagcctgacgttttatctttttcacaaaatttggcttggcaagactttcccaacttgaaaaaaaaaaatctctctacaaaggtgtaaactatgcagccatgaataacaatatttaaaagaacatccagagttctgctgctggttagcaagtaggagcatgtgaaagactttgctcctgccaaaagaagaagaaatcaccagagaaaacaaaaagcatactttttatttagtgtcattacagagctttggacacaaatctaaaagaaccaaattctagaggaatgagctcttcgaaggtgagcagcaaggaatagaggaggttgcatacctagattgagttgctgagtttgggggtaaaatgacaggggagtgaggcttcagggaaggacagtttttacttgggtggggagaaactctctaaactattgacaaacttggaggctggtatcatcagatttgatcctggaggagcccccagtgcagaaataattctctcttccaaataactcactaatgttgctaagtaaacagaggctggaagagaaggtgaaaagcagaaagagttctcaaatctagccatctcacagtttttgaaatcttgtgatctctaagtctcatggttccaaacactctttacctccaaatcttatctcatgggcttgctctgttgaactcttgaaaatttgaggtcatgaagactggtggttttaaagtctcatgatcgtccactctcaccatctcttggttctgaggcctagccatcttatagggtttggtctttggactttcccagagaaagagggctgaacttcctttcaaagtgtttgaagacagaggtgtaaaaacttagtctaaccaaagccacaaccaaacacctattctatttaacatctgatgtgttcaaagatttcagcaccagcacaatacatgagttaggggctgggctgaaaagcagagactaatttctttagatccctcatactaaattccacctccctgctggaggaactaaatctgcaatgctgcccccaaacagttcaactcctgattggatcaaattcatcagcagtcacccaagttgcacatgcccattttctttagtctctactgttcttttagacccaatgtccaacacacaataaaatactatgattcaggcaacagcaggggaatgtgacacagattaagagaaaatcaatgaatagtaacaaacccgacaacgcagatgttggaattatcagacacggtccttaaaatagctattaaatatattaatactcttttttgatatgttgtaagatactttattcctccagactttataatcctcatatattgttgatgatttctcctttaagtagtaaattgtatttaaaaaaatttaaaggaaaaataatttatattaaagacatatgttaaacaattcacagaaaaagatggattaaatggatgaagagatgggggaatttatggagagatttagaaacagtgaaaaaggggccaaatgaaaatcctaagattgagaaatgaatctgaaatgaaaattttactggaagagattaatagcagattggacaaaacagaagaaagagatgatgaatttaaagaaagatgaatttaaattattcaaactaaagtacagagagaaaaaaagaataaaataaaaaataacaggaactcagcaaccatgacacaatatcaaatatatgtgtatttgaagtataagaagaagataaaagacaaaataaggcagaaaaggttattgaagattgtcagctaaaatttttccaaagttgaataaaaaatggcaattcataattctagacagttcaataaaccccaagtaggataaatgcaaagaaaaccaccagtaggcacatcgtggtcaaacaactgaaaaccaaagagaaaaatcacagaacagccagaggaaaaaaggcacattacgtataggggacaatgacggctgacttctcatggaaaacagtggaatgatccaagatgcagacctagactgaaagaaatgctaagggatgcttttcaggctgctgcaaaattataccagatggaaacttgtatgtagacaaagatacgaagatatgaagaataccgggaacggtaaatatatggctgaatatgaaagacaaatttttttcctttaggccaggcacagtgggtcacgcctataatcccagtgctttgggaggccaaggcgggcagatcatgaggtcaggagtttgagatgagcctgaccagtgtggtgaaaccctgtctctagtaaaaatacaaatattagccaggcatggtgataggtgcctgtaatcccaggtattcaggaagctgagggaagagaatctcttgaaccccggaggcggaggttacagtgagctgagatcgcaccacagagtaataaataaataaataaaaattctttaaaatacagtttactatttaagggaaatattaatatgttatgggcttgtaaagtatgaaaagagaaaaatacaacattatcaaaaaggatgagagtgtacaatttaagttattatgttgtaaaatttctgtattttattataaaggaagtggaatatcattagttcaaagtaaattgtggcatgttaaggatgcatattatagccagacatggtggcacacgcctgtagttccagctactccaaagactgaggtgagaggatcacttgagcccaggagttcaaggcagcagtgaaccgtgatcgcaccacagcactccagcctgggaacagagcgagactctgtcaaaacaacaagaacaacaaacaacccagataaaaaggggtagctaaaaagccagtagaagagagagaagggaatattaaaacatacctaattaatccaaaagaagacagaaaaggataagaaaatgaacaaaagggacaagtaaaacaaattaaaacaattgtagactaaagcctaacaatattgataattacattaaataaaactctccaagtaaaaggaaaatattgtcagcctgcttaaagaagtaaagcccaactgtatcttgtttacatgagaggccctttaaatagaaagacacagacaaattgaaaataaactgttgaaaaaactacagaccacgtaaagactaaaaataagaaagttgatttggctctatgaatatcagataaaatagacttaaagacaaggagtattaccaggggtaaagcgggtaatttttataaagagaaaggacataatccttatacaactacttgaatattaacaaaaaccactgaactatatactttaagttgtacacatttaaattgtgtattttaaatgagtgaatgacatagtctataatttatatttcaaagctgttaagaagaaaggcggtctggaagttgattgaaatgactctcattgactaatatgatctcactcttccactggttcataattttttcagctttagtcatgtaacgtattaaattggtcaaaagcttatatatggtaaaatatttatctctagaggtatcagtccttaagagataaccatgctgttgttaagtgtctattcagctattcatttattaattcatttatttacctaggctatatgatgtatcctgtttaaagtagctttgttcacatactatgtatgccatttaaaatagctattttctgctcacctttacaatatgtttaaggtataacaaaacatatctacttttacattgtgtcatttgtaatgttgtttaatttttaaaattcttaacatagaaggaactgcttaaaggctacaactttttcttatcctaatatgcccatctctttgcaatatgactttgccactcctcacatccagagatgaggcctatttcttgctctcttgaataatggctggtctcttgacttgcttggactaagagcatgtggcagaagtgacactttgtaagtttcagagcctcagcctcaagaaggattgaagctcctacctttgttgtcttcaacactgaactgaggctgccatggaagaaggttggtcaagcctgctggagataagctatgtggaagagaatcatgtgccctaagtaatagcttgtgccagcttccatacatgtgagtgaggacatattgtgcctccagcccagtcaaccagtaataaaccccaagtaggataaatgcaaagaatcactgaatcaagctgaatcaagcttcatgtattatcccagcctaaaccagcaaaggagatgctcaaacttcagaattctgacaaataagacaaagttgttttaagccatagagttcttcagtgctttgttacacagcagtggctaaaggaaagagaaattgctacctggaagtaggatgatgtatagcaaaatcctaaaacatatgccactgcgtttgggatcaggtggcagatggaggtgggaagggtgtgtgaagaaaaagggagtgaagacgaaatgatcacaagaaagttcttgtggacactggagaaagacccaagttatgcaatggtgaaaagatgagcaagattgttatctgtagcaatttggaagctagactatgtgtttaatgtgtggatgtgaataaggaaatttcttggcataaagttagaaatatcagctgtcattttttagctgtactgatacacgaagagatacatgaactcatgaaggaactgtttagcttgcaaggaaaaattaaaagacatgcactaggttcaggacatgcattaggttcagggcatactaagtaaccaaccttccaaagtgctgggattacaggcacgagccaccgcacttggccctaaaactattttttcttcccagcaaatattttctcccagaaaagattcttaaagtaggaaacagtatcagggtaaagatcaaattaagggtgtgggtataagatcatttagtttggaactatttaatgtagttccaggaagatcctcttctcttcacaaaggacttctaggaaccacagggtcatattctaaagcagctccatgcaaggtcacaaatagagaaaggcctttctcaaaaagaattacggatgtatctttggcggggggcatttaatgattcccaatcaaattcataggaaagccacattttttaaagggttgtattagaagaaacactaccagcttggattataaggtacagagtattagacatgtcctcctgtcataaataatgataaactgaaaaagaaataggcaactcttttcagtcattagacaagaagcagcacagagctgtgacccttgagaaaggaaaagcgcagaagaggaaccgcactttcatactgtttttctacctagggcaatttgctaaacagggcacaaggaagtggagcccacatagagtatagcaatcctgctgagctggggaggatgagatcagtgttagggtctgctgcaagacctggaaatttcagggtaggatgctggagaggagagaacttacaaaagtctctgcagacttcagagtaagtatttcaatctctaaagttctctctttctcacatgcgtgcgcgcacacacacacacatacacacttatagctaaagagccaatagaataaaagaacataaaatataacccaaaagaaagcaggaagagaagagcagagaaacaaaagcaaatggcacaaagagtaaacaaacatcaaagtggtaacataaacccaacccatattgacaatttccttagttgtatatgggcttagaactccaatggaatggcagaaatgatcagcctgtttgtaaaagcaaaactcatatgttgtctacatgagagtaaatagtaggatacagattagctaagagtaaaaggatgagaaatacgtgccatttgaacagtaagcaaggggaagttggtatggatatatgaatatcaacatattatgttaagataaaagcgtcaattcagaagtaagaattctaagtgtatatgctgctaaaaataaaacttcaaaatacataaagtaaaaactgacagaactaaaaacaaatctacgattatagttagagatttttagcagtcttaggaatttatagaattactggataagcaatgagtaagaatacagaagatataaataatacaatcaaccaacttgacctaattgatatttacataatatcccaatgctaccatgtgcatttgaaacatttggcaagagagaccataatttcaaaagactgaagtgtttaaccatagtaaaattcagtgagaaattcacaataagatacctagaaaattgccaagtatttgtaaaataaataatccacatatcaataacttatgaatctaagaaggatattcaaattgaatatttcaaattgaatgaaaaaagacatgttctaaaattaagttgggtgtaactgagtgctcagaggataatttatagacttaatgcttatataaaaaaagatttaaaatcaatgatctaaaattccaccataagctagaaacaagaccaaattaaatgcaaagtataaggaagtaaataataaatataagattagaaattaatgaaatagaaaacaacagaaaattgacagcactaaaaagatatttctttgaaaagattaatgaaattgataaccacctagcaaagctaataagcaaatagagaaaatttaaatttgctttatcaggagtgaagagaataatatcactacagattgaatagacattaaaaggataataagggcatattgtgaccagtaacttttgtcatatgtcaacaactttgacaatgtagataaaattggtaaatttcttaaaagagacacattacaaaactaacacaaggataattagaaactctgaaaagccttgtatctatgaaagaagatgaatttgtacttaagcatcttcccacaaagaaaactgcaggccaatatggtttcatggatgaattcagtcgaatatttgagaagaaatattgccgatgccacataattctttttccagagggaataccttccaactcattttgcaaggctagcataaatctgataccaaacctcacaaagatattaaaataaaataaacttacagaccaacagcctcatgaacatagacacaaatcttttttgaaagttagcaaataaaaaaccataaatatattgaaaagaaaacaaataaacaggagtgcaaggttggttcacttttttaaagaaatcagggccaggcacggtggctcacgcctgtaatcccagcactttgggaggccgaggcgggcagatcacctgacatctggagttcgagaccaggctggccaatatggtgaaaccccatctctactaaaaatacaaaaattagctgggcgtggttgcaggcacctgtaatcccagctactcaggaggccaaggcaggagaatcgcatgaacctgggaggcggaggtagcagtgagctgagatcgcgccattgcactccagcctgggggacaagagtgagacttcatctcaaaaaaaaaaaaaaaaagaaatcaatataattcatcttgaaatgaagaatcgtgtgatcatctcaatagatacatgtattagttttctattcctgcataacaaatcaccccaaaacctagtggctcaaagcaatgaggatgtattatatcgcagttcctgtgaatccattacgtagcttggctggatgcctctagctcggtctctcacaaggccacaaacaagataccaactgatgctgcagtcatcttttggcattactgaggatggttccacttctcagctcattcatatggcttttgcaaagatctagttctttgggtggttgaactgagggccttggttccttgctgactcttgtttggaggtcagcctcagttccttgtcacagagacctctccttaaggcagttcacaacatggcctcttgcttcattggagggaacaaatgagggcaagagagagagtgcaagcaagtggaaagtcagtccttgattaccttatctcaaaaatgacatcttcatcctgtttgccatatcctgttctttagaagcaagtcacgtggttcagctcatacacaaaggagagggttacacaaagggtgtgaatatgcagaggccatcagaggcgactgtagatgcagcctaccatatacctaaaaagcattccacaaaattcaaaacccatttatgattttaaaaagttaacagcaaagtagtagtagaatggaatttcctcaatctgataaagagcatccattgaaaaactatagctagcattatactttatgatgatatattaaatatgtttcccctaacagcagaaaaaaggccagaatacattatcttaccacttttattcaacattgtactggagtttggccagtgtaataagacatacaactgtctttgtggaaaagaagaagtaaaactctttattcacagataacaggaatctataaaaatttagttacattcctataaataagcaacccataactggaaaataaaattttaaaatattcccctttaaaatagtattccaagcattaaatactttggaataaaattaataagagatgaaaaatataatacatactttaaaacatttttgagagtaattttaaaagactcaatcaattataccatattcatggactagaagactcaacattaagtatcacctgttcccaaatttatctaaagatttagcataatactcaccaaactcccagcaggttttttttgtagccattgataaactgattctaaaatctgtatgaagatataaaggagttagaatatacaacacaaatttgtaaacaaaatcaagggcttttgctatgtgaccttaacactcactataagctacagtaatcaagaaattatattattaaattattaaagaaattatattattaaaataatgataaagaaaaagcatatcaatgaaacaaaatagtccaaaaatacacctacatgtttatagtcaatttatttgcaatgaagatatgacgataattcatcaaagaaatacaatcttttcaacaaatgatgctagatgaattggatgtgcatataaagaaattgattagatatctaaacataaaagcagatattataaaacttttagaagaaaatatacgaaaaagcctttgtgactttaaggtaggtgaaaatttcttaaacaggagtcaaaaagcaaactattaaaatattaatagttatttgttggtctttattaaaattaataacttcttttcaaataacactgttaaggaaatgaaaaggcaaccacataccaggagaaaatatctttagtaatatatctgacaaaagacttgtatccagaatatataaggcactctcataattcagtaataaaccagacaacctaatgaaacaaatatgcaaaaaacttaaacagaaacctcagggaagatttacaaatgaccaataagtacatgaaggatgcatgccaccactcatcagaaaaatgcaaataaaagcaaaatgggataccagttcatactcactagattgaagtcttaaagctgaaaataccaagtgttgtggatgatgtggagcaactggaactctcatatattccttgtgggattgtaatataatacatctactttggaaaagaattatatacacatccacttaatgacttggaaattctaagcctagctattttctgaagacaaataaaaacatacatgcataaaatcttgtgtacaaattttcacagcagctttatttataatagccccagactcgaaaaaactcaaatgttcatcaagaggtaaatggaaataggaaacattgaaacattgattttcaaataatctttttggaataccatgtattatggtatagccatacaataagttattactcagtaataaaaatgaagaaaaggctttcttcactggagttaatctcaaaaagttaagttgcatgaaaaaacttgacacaaaagagtacataagtacatcattccatttacctgaaggtctaggactagtacatttaagctatggcaatagaaattggatcactgggtacccaaaacttctgagagtttgacttcaaaagagcccccaggaactttctgtgaatgatgtgttctgtatcttaattggggtaatgactatgtgggtgaatatattttcaaaactcattaaagcagtactcttaaattatattcgtctgatcttaaattgatttataaaaagaatatttacagatgcagggtacttctatttctttgcattattttgtttcctctaaagcagcttgtactttacagaaactgctctcttaatgagtgtctgtcaatgtcctcctaattgcatatttaatgggctgtttattctttgttccctttaaacttttgggagcatttcacattgttacttacttcctttttcttgaaactcttttcttggtctgataccacacaaacctacattttcttctgtttctccagtcaattcttctctgatatctttgaggttcttctttctcttgctcactgaatatagttgtaggccatcttctcttctccctctatattcattttctgggtaatctgatattaatcccatgactttaactatcatttctatatggaaatttaaatctatagcttcactccctgcccttatttcagaactctagttctactattttagctgccctttgaagcccaactcgtttatggcaaattctggacttcagataccattgtatctccagagtctcacacggtgtcaagcatggtatccgacttatagtttgatgtagaattcatgggtttattggatattaggagtggttaggtggtaagtatgaaggatgacccctaatttattatttggataactgcagagatgatggttgttaactgagacagggaataaggaaataagaggccatagaagcaaagaaggaaaataagagaagaattaagtgcaattttgagcatgttgaatttgagatctcaaatgcatactgatgtcagagtaaactcctaaagtacagtttgatcatgacatgtcttccttcttcaaaaaccttcaatgatttcccactgttgatcaagtccatatcaaactccctaccctagaatttaagattttccaccatctctggctaccacctgactttctcacacaatctcagatccttcccttctaacagatctgctcttcccgccctcctcacccacgtgtgtatcagacagtgccacctactgagtaacaccttccttctggagagcaccctctctccaatcgaccaaattcctatccatcctttaagactcaactcagacagcatttatacgattagaatagttttctccaattaccagacagaaatactcctattactgaggacatatcaattttgtcacatgtattgaccacataacattccttcttacttgtgtgtagctatttgtgtatgtttttattactcctccaagacttaaagcttttaagccttaagtagagctttaaggtacagaatgtgtttcatttatattttcaatccctccaagtaactagcccatcatgtgacatataataagtgtttaataaataataaaataaaagactacaatagaaatgaatgaataattgaaggcatgaaggaaggaatagttgaagtagttgagaataatggttccctggctgtttttacatacttgcctgcagcaatttcttaataactgtgcagaatgtgcctacactgaaataagcacgtgttcactagaaaatgaggccaaaaaaattcagcttgcctgtatgactatcaaagtttgagctaattgatccatggcttggagtttgtagctgttggtcccagctagagttcttgtgccaattaatagactagacagagtgaaaatagaagccaagtgaaatgcttattcttctccaggctcactatatataaattattaatgcttcctcatactacatttgccttgaatatatttaaatgtgaatacattggtagaagcagaaaataaatttgtttccatcactccaatgtaatttataaaactaacatttattatatatttctgattacaaaataaatgtgttccttgtagaaaatttgcaaagtgtatagaatcataaagatgaaatgaaaatcattgataaggtcccctctgtaatataaatttgttaatatattggcatatatacttttagggtttttttttttaatgttgtatgaaatacaagcatcttctaactttgttttcttaatacatttagaatattttctctgtaatcaagaattcttcatagaatgtaactttcaatgtttgctgtatgctctagcttctcaataggtcatgcagtcaatttgttattgaccacttagcttgttttgaacatttcatgattatacataactgatagacatccctggacccaaagccttagcacctcttattatatttttataagttgtagttatggaatcactgagtcaaatagtgtgcacagtgttatggttttttcacacatatagcttggcagaaagatttttgttttgttttgtttttaatcaatttacattccaatccatattatgtgaaatttcctatttccccatatccccttcaccagttttataggtaaaaaattgtacctcaaaaatcacaagcatttctatatatcaataacagacagagagccaaatcatgagtgaactcccattcacaattgctacaaggagaataaaatacctaggaatacaacttacaagggatgtgaaggacctcttcaaggagaactacaaacaactcctcagggaaataatagaggacacaaacaaccggaaaaacattccatgctcatggataggaagaatcaatatcatgaaaatggccatactgcccaaagtaatttatagatacaatgtgatccctatcctgctgccattgactttcttcacagaattagaaaaaactactttaaatttcatatggaaccaaaaaggagtccatatagccaagacattcctaagcaaaaagaataaatctggaggtatcatgctatctgacttcaaactgtactacaaggccacagtaaccaaaacagcatggtactggtaccaaaacagatatatagaccaatggaacaggacagaggccttagaaataatgccgcacatctacaaccatctaatctttgacaaacctgacacaaacaagcaatggggaaaggattccctatttaataaatggtgttgggaaaactggctagccatatgccgaaaactgaaattggatcccttctttacaccttatacaaaaattaactcaagatggattaaagacttaaatgtaagacctaaaaccatacaaaccctagaaaaaaaacctgggcaataccattcaggacataggcatgggcaaagacttcatgactaaacattaaaagcaatggcaacaaaagccaaaattgacaattgggatctaattaaactaaagagcttctgcacagcaaaagaaactatcatgagagtgaacaggcaacctacagaatgggagaaaatttttgcaatctatccatctgacagaaggctaatatccagaatatacaaggaacttaaacaaatttacaagagaaaaacaaccccatcaaaaggatatgaacagacacttctcaaaagaaggcatttatgtgaacaacaaacatatgaaaaaaaagctcatcatcagtggtggttagagaaatgcaaatcaaaaccacaatgagataacatctcacaccagttaaaatggtgatcactaaaaagtcaggaaacaacaggtgctggagaggatgtggagaaataggaacactttttttttttttttttttttttgagacggagtctcgctctgtcgcccaggctggagtgcagtggcgggatctcggctcactgcaagctccgccttccgggttcacgccattctcctgcctcagcctcccaagtagctgggactacaggcgcccgccactacgcacggctaattttttgtatttttagtagagacggggtttcaccgttttttagccgggatggtctcgatctcctgacctcgtgatccgcccgcctcggcctcccaaagtgctgggattacaggcgtgagccaccgcgcccggccaggaacacttttacactgttggtgggactgtaaactagttcaaccattgtggaagtcagtgtggcaattcctcagggatcttgaactagaaataccatttgacccagcaatcccattactgggtatatacccaaaggattataaataatgctgctataaagacacatgcacacgtatgtttattacagcactattcacaataacaaagacttggaaccaacttaagtgcccatcaatgatagactggttaaagaaaatatggcacgtatacaccatggaatactatgcagccataaaaaaagatgagttcatgtcctttgcagggacatggatgaagctagaaaccatcattctcagcaaactaacacaggaacagaacaccacacaccgcatattctcactcataagagggagttgaacaatgagaacacttggatgcagggaggggaacatcgtacactggggcctgttgagggttgggaggctaggggagggatagcattagtagaaatacctaatgtagatgatggcttgataggtgcagcaaaccaccatggcatgtgtatacctatgtaacaaacctgcacgttatacacatgtatcccagaactcaaagtatgtataaaaattacacctcacggttgtttaatttacatttacctgagtactttgttaaatttccttccatctcataaaccctttatatttcttcttttgtcacttgacagcttatatcttttgtctcctttgtatttatatttgtaagaactatttatttattgcagttattaactttttgccatatattacaataatatttccccagttttcatctgcctgtgaacttcatttttgttgattttttacatatagaattctttcatttaatgttgtgaaatacattctttttttgataaattctgcctttacgtgtatacaagattaatatgctttttcatgttactttatttcaaatactttaacgtttcaacttatggtttatactgagatgttgtgagatagaattaatactactttattttttccctaaataattaggtaattctcctagtgctattactgaataattcctttctttgaatgattttaaacatcacctttattggtatcaaactctcacacatactattctccactctagactttgtcttttgtttcaattatctgtttatctgaaaggacactttttcattattgtagaatttcaatgtgtctaaatatttactaatgtcattccacccttcttcttttttagaagatttattgactcttccatttatttttctagataaactttaaaaatgattaactcaggttccagaaaggtccttttaggatttgttagaatctcattgattcattcattaaataactgctgactgacaacttgcaaaatcatatctacccatccagaaacatgattttgatccatcttttctttagtccgtaaagttttcttatgcattaagcaatttttaaacatcatatttatgtctgggaatctcattttgttgttgttcctgtcgtgaatggagtcttatttcattatatttctaacagagtattgctagtataatgcatatttattttataactggccaatttagtgaattatcttgtaagacctaggaagctcacttccttctcacattcttaggaatatcacctacaaatatttgtcttttagttgtgccatctttttctttatgattttgtgagagtctttttaaattctcaatattgatctttcattggcttttaaccatctagatcctataccatatatatatatatatatgatcctataccatatatatatcatgtataagatacacacactcacatatatagatatatatatatatatttttcctcctagttgtcatccagcaactaactgcatgcatggtatacttcattgaacagaattctttcattttggtgtagtcaatttcactaaaatttcaccttaaaatttgtggttgtggagtctcatttaaaagtatccggctccacccctaggtaagatttacttcaacatctttaccagctttatagtttcacattcttatcttgatttttaatccatttggtatagatttttgcaaatagtacaaggtaagctttcttcctcctgtgagccagttttaccaacaccatcaattagacaatccattctttctacatcaatttataccacctccttgataaaccaccaatatatacacagtgtaaagttgatttagcttttcacgacctttcattcttacatataaaatttaaaataaattattaagctcctaaaaaaaaatcctgctggaatgtcagttggccagtttagtgaattctcagtgaggatcgctccagtgatccttctgcctcagtcttctgagtagctgggactacaggtgcatgccaccatgcctggctaagtttatttaaaaaaattttgtagagacagggtcttgctttgttgctcaggctggataaataagtattttaatttaatttatgaagtgctttctctgcatctacctttgatatggtaaattgtactgatagattttctaatgttaaatcacccttacaaattaggataaaatctattgatcaagatccatatgttggctttagttagctaatattttatttaaaatgtgtgtatctaggtgcatgtgaaatggtttataatttatttatctctttccttatactcattcctctcttcattttgttgttgttatctagaattttaattctgagttgtaatggatatatgataaatttattacagtcaatccttcgtttatattataactattctcctcaacttcttacttttcttactggaatactttctctaggagtatttccgaagaggtatttgtagcaaaccattttatgccaaaaaaaaaatctttattacatgcttatatctaaatggtggtttctgtggatataaaattctaggctttaagataatttcttccaacattttgaaaatatttctctattgctgcctgcctttggtcttgtaattagtctgatgtcaaagtgattcttgcttttcagtaggtgagccactgcttttttctggaatcttttggaaatacctctttggctttaatgttctgaagttttataattttatttagtgcaggagagctttatatttactctgcatttatttttaatctgaaagtgatattttttgaaatctggaaaatccagttatttcttctcaactgtgttttttatatatatatatatatatatatatatatctttttttcttcccctggcatttcaatatatgcatattttttgttaatactttcttggtgccttctaggaagagttctttaatatgatcttaaaatgattatgtctccattcatgctattaactgaattatttccattgtatttctcatgcgtaatacgtgcagatgattcttcatgacttcttcctccttcagtgttgaaagtgtcctcttttatgttcctctttcatgttttgaacaacctctcttgtctcactgatgataagtattttaaattcttgctctgttctgacgctttctgttggtttcatttgtccaggttgccttctttcttataactgccatgaagatgtcttgtgattgtttctagcaaactcacagtctcctggggaagtttgatcttcttggttcatgaagcaaaccccaggaaaggagttagagatcaggtcccagcgtgtgtgctctccagaggagaaacactttagctctgttgcttgtctctctctttgccctggctgtgccttttcaggagctgtaatcctgtaggtactgagatgtgggtggttgggtgttgggggaatcctgagtggttagctgcagtcctttctggagaggctgatgcaccaccctgatttttcactctccctttattgctgggctgggactccacactgctgctgtatttgatgttacatatgaggttctgcctgcagcaatgaagacactagccctggagagataaaaggcacattaaaaaaaaatttccatccagtctgggcaacatggtgaaacctcgtctcaattacaaaaaattagcacgtgtggtggcatttgcctatggtcccagctaatcaggaggctgagggggtaggatcacttgagctcgggacattgaggctgcaatgagctgtcattgcaccactgcactccagtctgggcaacaggtgagaccctgtctcaaaaaaacaaaaaacacacaaactttccctcgtcctacctgtgctatgcagcccgcttttcatgttgacttttatacttgtcatgccggttcatgctgactcacagcctcaccaggaccccaatcgcacactgttgctctggagttgctagcattttatttgtttgtttaaccactctgattcactaatttctccctagcttctatgggacatgtattcataagaggaggccaacaacatttgttagtgctgctatcctgtctgttatgaattttattttttattattttaattttagagatgagggttcttgctctgttgcccaggctagagtgcagtgacctcatcatagctcactgctcgctatagcctcaaacccctggactcaagggatcctctcaactcagcttcctgagtagctgagattaagccattgtactctgcttgttatgaattttatatgttgatctcttatccagtgttcttgatgaatctttattagtttgcctgcagatttgatattcaatgtagaaaactgtattttctacagataatgtgagtgatgtatcttcctttacaattcttaaaattttcttgtaattagaatatctagtgcaatattaatagtagatttgatattgagaatcattgtgctgttcttggctttaattagaataatatttgcttttggttttggatacagttcttaaagaaatttccttctattcttggtttactgggaatttctttttctttaaattatgaatgctgttgaattttgtcaaatctcttttctgcatttattgtgatgattatatggttttccttctataatttgttaatatggtaggaatatataaatagattttctgatgctgaaacatccttgcattcttggaatatatattgaattttattggctaatagcttaaaatttttgtacatatgcttataaatgagtttgagttatatgatcttatttttgttcagtgtgggacaattttatatcaaacctatagagtgagttgtataacttctccccaccgactaaacctgtttacataagagaatatttcttgaacgtctaaaaaaactaagctgtgaaaccacttagaatggtaatgtttttgtgagggtaaagaaatattttattatcagttaaattattgtaaaggattttttgttttgagagagtgtcactctgttgcccaggatggagtgcagtggtgcaatctcggctcactgcaacctccacctcccaggttcaagcgattctcctgcttcagcctcccgagtagctgggactacaggcacccaccaccacacccagctaatttttgtatttttagtagagatggggtttcgccatgttggccaggcttatctcaaactcctgacctcaagtgatccacccgccttggcctcccaaagtgttgggattacaggcgtgagccactatgctcaggcatttaaaggatatagacatatttaaggggtgaaactccttaaattctcttcttgagataatttttagaatttaggtttttctagaaaattacccatttcatttaagcttcaaaatttattggcttaaggttgttcctaatgttctcatgattaaagaaaaaactctattacatatatggttatgcctctttatacgttgttaaacttcacttaggattttttggtcattatatattcataatatatgtgatgtatatattataattcatggttcatgaatactatatatataaaatactatatatatctggatagatatatgttgacagatatctagatctatacagatagagacatggcccttaatatataatatccaatgaagatttaagaacttaactaaattattaccaaaaacatgcattcttttctggactcctttctaatcgcatttgcgtgtctccctgcttctgaggaatcatctctaacttgaatcttgtttagcattctcctgctttaaaaagtattttattgcatatacatatgtatgtctctataatacatgaatcagtcttgcttgattttgaactatataaaaggagtatcttactatatgtaattctctgtgattttctttttcatgtgacattttaagattcatccaggtcatttatgtagttttaatttttcattttcatttctctgaaatattccattgtgagaatatacccatttaacttttccctgtcaatttttttccccctgacatttaggctatttctagttttttgatattatgaatagtgctgctatgacatttttgtacttatctcttgagacacacatactaaagtttttcttggatatgtgtctgggagtagaattactgagttgtggggtataagaactttgttttatacgataatgctgtattgttttataaaatgactatcagtttgcactctcagcagttacacatggggatcctactgacacatatttttgccaaaacagtatgtttggcaaaaaatgtcttcaatttgatcgtcatggccaatgggagtcagggctagattgcagctccagacacagcagcttgcggaagctcgcattgtgaattttagctccagatcaactggcaagtacaaaccagcaaacccgagaggacccacagaccgtccgaaggaaacagactgctcctgcgggacccaggagacaccccgaatactgtgagagccccaactgtggaggtggaaaagggagaccctcctctccccaacacacacacccacaggagaagctaaatgtccatttgcaggagaagtttctgactacctggagctgagtcaatttagagaactgaacaaaatacaggtgttgacgaagcatcagaaaggccctgggagctcactgtgtcccctagcaggccattcctgctggcaccacagggatccatagggaggatgatgagaggagcagggggtgaaactccaccaggagaaggaattctgtagccgaactttgtaagaatttgaacggggtgagaaggcccctggccagaacctgggtgagggcacaaatccggtgtgcagactccacaggtggggaaagaaccaagcccttttctttctcagctggagaggcaggtagcctggggcaagttttcaagcctgtcatgctctgcacctggaaacggacttgggctcttggtgggggcacggtgggagtgagactggccttttggtttgtgtgggagctgggtgagacttgtgactgccggctttcccttgcttccctgacaacatgcatgactcagcagaggcagccataatcctcctaggaacacaactccagtgacctgggactctcaccctcatccctcacagcagctgcagcaagacccgcccaaggagagtctgagctcagacacacctagccccatccctacctgatggtcctttccctatccaccctggtagcagaagacaaaggacatataatctggggggctctagagccctgcccactgccagtccctctctatactactacagctgatgctttctggaaagtgccacctcctggcagggggccaaccagcacaaaaatagaacattaaaccaccaaagctaagaaccctcatggaatccattgcacacccccgccacctctaccagaacaggtgctggtatccacggctgagagaacagctcacattacaggactctgtagagacaacccccagtactagctggtagccagatagactcgctgggtggctagactcagaagagagacaacaatcatagtagttcagctcacaggaagccacatccatagaaaaagaggaagagtactacatcaagagaacaccctgtgggtcaaaagaatctgaacaacagccttcagccctagaccttccttctgacagagcctacccaaatgagagggaaacacaaaaccaaccctggtaataataacaaaacaaggctcttcaacacccccacaaaatcactctttccctagcaatggatccaaaccaagaagaaatccctgatttacccgaaaaagaattcagaaggttagttactaagctaatcagggagggaccagagaaaggtgaagcctaatgcaaggaaatccaaaaaatgatacaagaagtgaagggagaaatattcaaggaaatagatagcttaaacaatcaaaaattcaggaaactttggatatacttttagaagtgcaaaatgctctggaacgtctcagcaatataatggaacaagtagaagaaagaaattcagagctcaaagacaaggtctttgaattaacccagtccagcaaagacaaaaaagaataagaaaatatgaacaaagcctccaggaattctgggattatgtgaaatgaccaaacttcagaattatcagcattcctgaggaagaagagaattctcaaagcttagaaaacatgttcaggggaataatcaaggaaaacttccctggccttgctagagacctagacatccaaatacaagaagcacaaagaacacctggaaaattcatcacaaaaagatctttgcctaggcacgttgtcatcaggttatccaaagttaagacaaaggaaagaatcttaagagctctgtgacagaagcatcaggtaacttataaaggaaagcctagcagattaacagcagatttctcagcagaaaccctacaagctagaaaggattggagccttatcttcagcttcctcaaacaaaacaattatcagccaagaattctgtatccagtgaaactgagcatcatatatgaaggaaagatacagtcgttttcagacaaacaaatgctgagagaattcgccattaccaagccaccactataagaactggtaaaaaggagctttaaatcttgaaacaaaacttggaaacacatcaaaacagaacttctttaaagcataaatcacacaagacctataaaacaaaaatacatgttaaaaagcaaaaacaaaaaaaccaaagtacacaggaaacaaagagcacgatgaatgcaatggtatctcacatttcaatactaatattgaatgtaaatagcctgaatgctccacttaaaagatacagaatcacagaatggatcagtactcacctaccctctgctgccttcaggagactcacttaacacataaggattcatatacttaaaggggtggaaaaaggcatttcatgcaaatgcactaaaagcaagcaggggtagctattcttatatcagataaaatgaattttaaaataacagcagttaaaagacaaagagggacattatataatgataaaaggccttgtccaacaggaaaatatcacaatcctaaacatatatgcaccggacactggagttcccaaatttataaaacaattactaatagacctaagaaaggagatagacagcaacacagtaatagtgggggacttcaatactccactgacagcactagacagatcatcaagacagaaagtcaacaaagaaacaatggatgtaaactatactttggaacaaatggacttaacagatatatacagaacatttaatccaacaacagcataatacacattctattcaacagtgcatggaaatttctccaagatagaccatatgataggccataaaacgtgcctcaataaatttaagaaaattgcaattatatcaagcactatctttgaccacagtggaataaaactggaaatcaactccaaaagaaaccttcagaaccatgcaaatacatggtaattaaataacctactcttgaatgagcattgggtcaaaaatgaaatcaagatggaaatttaaaagttctttgaactgaatacaataatgacacaacctttcaaaacctctggatacagcaaaggcaatgttaagaggaaagttcatagccctaagcacctacatcaaaaagataaagagtacaaactggtattctaaggtcacaccttaaggaactagagaaacacaggaacaaagcaaacccaaatccagcagaagaaaggaaattaccaagatcagagcagaactaaatgaaattgaaacaaaaaatacaaaagataaatgaaacaaaaagctggttctttgaaaagataaataaaattgatagaccattagcaaggttaaccaagaaaagaaaagagaaaatccaaataacctcactaagaaacgaaacaggatatattacaactgacaccactgaaatacaaaataccattcaaggctactatgaacacctttatccacataaactagaaaacctagaagagatggataaattcctggaaaaatacaaccatcctagcttaaatcagaaagaattagataccctgaacagaccaataacaggcagggagattgaaatggcaatttaaaaattaccaacaaaaagtccaagatcaggcagattcacagcagaattctaccagacgttcaaagatgaatcggtacaaatccttttgacactattccacaagatagagcaagaaggaaccctccctaatctattttatgaagtcagcatgacctgattaccaaaaccaggaaaggacataaccaaaagaaaaactaaagactgatatccttgatgaacattgatgctaaaatccttaacaaaatattagctaaccgaatccaacaacatgtcaaaaagataatccactatgatcaagtgggtttcataccagggatgcaggtatggtttaacatacgtagccaataaatgtgatataccacatcaacagaattaaaaagaaaaatcatatgatgatctcaataggtgcagaaaaaagtttcaacaaaatccagcatctctttatgattaaaactctcagcaaattcagcatacaagggacgtaacgtaataaaaaccatcgatgacaaacccacagccaacataatacttagtggggaaaagttgaaaacattccttctgagaactggaacaagacaaggatgcctactctcaccactcctcttcaacatagtactggaagtcatagtcagagtaatcagacaagagaaagaaataaagggcatccaaattgggaaagaagaagtcaaactgtcactgtttgctcatatgttcgtttgtttgctaatatgttcatttattttgaaaaccctaaggactcctccagaaagctcctagaactggaaaataatttagcaaagtttccagatacaagattaatgtacacaaattggtagctcttctatacaccaacagcgatcaagtggagaatcaattcaagaactcaacccctttcacaagctgaaaaaaaaaaacttaggaatatatctaaccaaggagttgaaagacctctacaaggaaaactacaagacactgctgaaagaaatcatggatgacatgacataatggaaatacatctcatgctcatggatgggtagaaacaatattgtgaaaatgaccatactgccaaaaacatctacaaattcagtgcagtctccattaaaataccaccatcactcttcacagaattagaaaaaataattttaaaaatcatatggaaccagaaagacctgcatagccaaagtaagactaagcaaaaagaataaatctggaggcatcacactacctgatttcaagctatactataaggctatagtcatcaaaacagtatggcactagtataaaaataggcacatagaccaatggaacagaatagagaacccagaaataaacccaaatacttacagccaactgatctttgactaagcaaacaaaaacataaagtggggaaaggatatccgtttcaacaaatggtgctgggataattgcctagcaacatgtaggagacttaaactggatcctcatctcccactttgtataaaaatcaacgcatgattaaggacttaaacctaagacctgaaaccataaaaattctagaagataacactggaaaaacccttctagacattggcttaggcaaggatttcatgaccaggaacccaaaagcaagtgcattaaaaacaaagataaatagctggggcctaattaaactaaagagcttttgcacagcaaaaggaacagtcagcagagtaaacagacaacccacagagtgggagaaaatcttcacaatctatacatcggacaaaggactaatatccagaatctacaactatctctaacaaatcagtaagaaaaaagccaaacaatcccatcaaaaagtgggctaaggacatgaatagacagttctcaaaagaatatatacaaatggccaacaaatatatgaaaaaatgctcaacatcactagtgatcagggaaatgcaaatcaaaaccacaatgtgataccaccttattcctgcaagaatggccataatcaaaaaatcaaaaaacagtcaatattggtgtggatgtggtgaacagggaacacttctacactgctggtgggaatgtacagccaccagtggagattctttaaagaactaaaagtagaactaccatttgatccagcaatcccactactgggtatctacccagagatgaataaatcattattcaaaaaatatacttgcacatgcatgtttaaagtggcacaattcacaatagcaaaattgtggaactaacccaaatgcccatcaatcaacaagtggataaactgtgattgatacacacacacacacacacacacacgatggaatactatgcagccataaaaaagaatgaattaacagcatttgcagtgacctggatgagattggagactattattttaagtgaagtaactcaggaatggaaaaccaaacatcgtatgttctcagtgatatgtgggagctaagctatgaggatgcaaaggcataagaatgatacaaaggactttggacacttggggggaaaagttgggggggtggtgagggataaaagactacaaatatggtgcagtgtatactgctcagttcatgggtgcactaaaatctcacaaatcacctctaaagaacttactcatgtaaccaaataccacctgtacctcagtaacttatggaaaaataataaataaaaataaaaataaaatgcagggatggagtgcccactgatagccagacctaaaaaaagtcttcaatttttataaatcaaattagcaaaaaaatgacatctccgtttgatttgaatttccctgattactagtgcagttggacatatcttcactttattagccatatggtatataattcagaaaatcttttttccataactagattgtttcttattattgtatagaaatttaagaatatattttcaatttggacagtttcttcattatatgcatattttgattatttacttttttaaagtgtctttttgagcagaagtttaaaaactcttaatgcagttgaatctgtcaacattttctttttgaggttagtgcttttagtgtattaagaaatttttccctactacaaggccagaaagacatttacctatacttttttttctaaaagttttaaaggtctacttttcaaaaaatctgtaattgagtccaactctttggtgaaacatttaatcttctattttctctaccttttctttattgtctttagcatcataatcatatttaagatccttgtgtactaacactaacgtctgtatcccctgtaggtatgtttctattatctattttttctcttattactagtcatcctgtttcttggcatacccagtaactttttaaatagaatactagactgtatgggtacacatatacacatacacacacagtagaggttccatgtaatgttaacttcatcctgaaagagttcgtctttcctctgctagacagagtgggaactgatcaactaatcacattaggaaacaaactgattcaaggccagttgcgattttggtatggtgaagtctgtgtctggtttacttggctcctagatagatcctaaactctaatccttgtgttgtagcatggtatgactccggacaacttttccctgttttttgtgttgttttgttttcttctgtaggcttccagcttaattttttaaccttctgagtcacagctttagattttcagccaatgtactgagctctatatattggctctgtgtccagctcggtattcttgcccactctttctcagtcatctcaccagcccctctccccacgcaaatgtctctgttggtttttctgtcccccagcagcagccttccctctgggaggcaaattccagattatcagcctctttccctatgctcagaatcagtaatgaccccaggaaaaacaaaaacaaatgcaatttattggttgaaatctctgagctgtcctcctttttagaatattctcctctccccagttttggttgttttgtcagctctccaatgccttgaaactaattcttttatcttgctttgttttatttagcttttccagttgttttgggctagagagtggtctgctgcaaactacttaagcataaccagaagcaaaaatccatattgttttaaaaatgagttctggggagcccttgctaaggaacagaagagaagctgctggaagattcatcctctggggtctctgggttgatgttttacctcaatgcatctaggactcagaatagctggttgcaactatgactcttcattaacctgctgaataacatagaccagccatccaactttccccacttaagaaatgaggacattatctagtcttctcacttgacagaactgtcgtgagaaaagattatttatgtaagtgttttggaaaggtaaagatgatatacctgttgaatgcagtcaggtagttctctgtgatcagataggtgtttgtgtctctagctgttcattggatgaatgtctttctcccccaactagactgtaaacactttaaggatggggcctatgtcctctacttccattttatttcctacagtttcacattgcatgtcattcacaaaataggcatcatttaaataccctacagaaaaaaattgaacctttttctgtgtctgtccatacgtgcaggctatcagatatatgatctaagtgtttgtgtcgcccccagattaatatgctgaaagcctaacccacatggtgatggtattaggaggtggggcctttgaaaggcgattaatgagaacagagacagcatgattcagattggtgctcttgtaaaagaggccccagagagctagtgagccttttccaccgtggaggacccagcaagagggctccatctatgaaccagaaatcaggatctcaccaggtttcccagcctgaagaactggaagaaataaacttctgttgtttataagctacccagtttatggtattttgttgtagcaacccgaatggattaagacaagcctcatttttattttcagtctatgttggtaaatcccagcttagggatttgccgtttgagggacaagttttgatcatcagctcttcctcttttatttttaacttttttcttttattatttttaattgacacataattgtgcatatttatggggtacatcttgatacatgtatacaatgtgtagtgatcaaatcagagtaattagcatatccatcatctcaaacatttttcacttctttgggaatattcaaaatcatctagctatctgaaaatatacaataagttgttgtttatagtcaccctacagtgctgcagaacactagaacttgtacctcctatctagctgtagttgtgcatccattaaccaacttctccctattttctccttccctctagtaaccatatttctactttgtgcttctatgagatcagctgttttagcttccacataagggtaagaacaagcagtatttatttttctgtccctggcttatttcactgaacataatgttctccaagctcatccatgttgctgtaaataccaggatttcattctctttatggctgaatagtattccattgtgtatataggccacattttctttatccatttatttcttaatgggcacttagtttggttccatatcttggttattgcatatagtgctgcaataaacatggaggtgtggataatctcttcaacatactgatttcccttccttgggtatagctagatcataaggtagttctatttttagttttttgagggaccacaatactgctttccaccatgcctgtactaatttgcatccctattaacagtgtataagaattcccctttctccatatctttgctagcctttttttgtctttttgataatagcctttctaatgggtgaaatgatatcttgtggttttgatttgcatttccctgatgattagtgatgttgagcattttttcatgtactggttggccagttgtatattttttttttctgagagatgtgtatttagttcatttgcccattttaaaatcagattattatgattattttttgctgttaagttccctgtatattctggatactaattccttgttggatgaatggtttgcacatattttctcccattctttaggttgtctcttcactctgttgattgcttcatttgccatggaggagccttttagtttgatataatcccatttgtctatttttgcttttgttgcaggtgcttttgcaggcctatccataaaatctttgcctgttccaatgtcctgaagcatttctgctatgatttcttctaacagtttcatagtttgggatcttatatttaagtctaattcattttacttttttttatatatagcgagagatagggtttagtttcattcttccgtgtatggatattgtattagtctgttctcatgctgctaataaagacacatccaagacaggataatttataaatgaaagaggtttaattgactctcagttcagcatggctggttaggcgtcaggaaacttacagtcatggtggaaggtaaagcaaagacatccttcatcacatggtgacagcaaggagaagtacagagcaaaggggcaaagccccttataaagccatcagatctcatgagaactcactcagtatcatgagaatggcatgaagtaaccgcccccatgattcagttacctcccattaggtccctcccacaacctttgggaatgatgggaactacagttcaagatgagacataggtggggacacagccaaaccatatcagataagcagtttccccatcaccattcattgaatagactgtcttttccccagtaaatgttcttaagatctttgtcaaaaatcagtaggctgtaactgtgtggatttatttctgggtcctctattctggtccattggtctacatgactgtttttatgccagtactatgctgtttgggttactataattttgtagtatattttcagtcagacagtgtgatgcctccagttttgttctctttgctcaggattgctttagctatttgaggtcttttgtggttccgtatgaattttaggattgtttttctattcctgtgaagaatgtcgttgatcttttgatagcgattgcattgaatatgcagattgcttttggtagtatgctcattttcacaatatcattctaccagttcatgaacatggaaggtcttttcattttttttgtcctctttatttcatcagtgttttatagttttcattgatgagatcttttacctccatgattacatttatttttaggtattttattttattttatttttgttgctattacaactgtggttactttcttgacttctttttcagctagtttattgatagtctataaaaaacgctatagatttttatgtgttgattttgtatcctgcagctttactgatttttaaaaatcagttctaaaagtttgatggcactcttagggttttctatgtgtaagatcgtgtcatctgcaaatagggacaatttgacttcttctgttccaatttggatgccctttagttttttcttttgcctaattactctggcttaagacttccaaaggtctacttttgacatttttattttaattattttgtgctttctagtttcactgttttttttttttaatttcgttcaatattgatgcatacttaaaaggactttcttcaatactgggcaattcttagctttttttttttttaatattgcctttccatttttacctttattctctttttccagaactcctacttaatggatattagaaattctcaatatattactcgtcttttaacagctcttctttaaaaaaaaatctctatttctctgtgtacactatagagaaaacatttttgtattttcttcaaattccccaattctctctttaattaatcccagtcaagttattgtcctattatcctgttgagtttattagatcaactatatttttcaacttaatggttgtaattttaaaaaatactcacttgttctttttacgtttctatttcataattttattgttatttgtagatatgattccttcatttatctctttgtagatcctaaacatatttattttgaggcctatttcagattgttttcttattttatttctatctgtagtgaactcatattttgatcgttaattttgttggcttttttcctatttcttgctttatttggaacttatatttttaggctcattttaaatgggtggatatttttctttcactctttccttattttaatttaatttactctccagttaatggttttgaaatgactgtccgtaggccccacagaaccatgctttttattggtggtctaggactcaggctctgcagtgaaactgggcatggtatagctttggctggctggtggtttgattcctttccggatcttaaggctctgtctgctttattttgctgaagcatttggcaataacttttaggaggcccagaagtcaacccaaaaatacattttattctgtagtttcttaattgttaatatcaagtgtaaaacattatcccttgcctcctcccactttagatgagtaatttaacatgtaaattcccccttctctcctccttcttggttttgctaatatgatttgggattttaaatcagaattactgctctaaatttattgttttaaaaggccagcttccctcttaaacagggaatgcttcagtgtaatataataggaacacccatgattctctaaacttccataaatgaagcactagtgatcataaagaagatgaagaaattttgggggactgccaatttcctttcacctaggtgataattgtaaaaagtgaaacataaaagtggcctgactaaaacaggcaatcttcgtaggtctttctaatagttatctttgtttcagtgcagcttttagcttatgtcctggttataaataggttacacaataggcattggaaatattcatgagagtgtggaggtatttaaatggcaagtaattgctggagttacagcaaaaactaaaagctagatggtctacactatcacggaatttatcacagttaaacaaactgtgagccatttgtgcttcctcttcaagttcaccttcaacacgtttcatctgtcttccatctccatggctgcactaaagctgccctggtcaaggatgctcatgatctccatgttgccaaacctaatagacctcactgtacttgactttttggcaacattcatgagagttgactgcccatctttcttaagacacttttccctcttagttttgatgaaaccaactcctatttttcctcctgtttttctggctgctccttgactttttgaccgataaatattagagttcccagggcttattcctgagtcttattttctatcaatactctctccttatgaaaccttaaccagtcccatagctttaaataatgcataatgaggattcttagttaattttcagctctaaaccctcttccaaattgcaaactaactcataggactgatttcctgtttgatatcaccacatggatgtgtaacaaacgtttcaaacttaacatgtctgaaacaaaccaggaattgtcacccatccaatggttccttcccaattccccccagcactgaacctcagtaaatgatcctaccagacagttgctaagccaaaaatctagaaatctcttatcactgtttctttaaccccaacatccaatccatcagatcacctacaatatacatgttgactctaccatgtctctccattcccatcaccactatgaaagtttaagccaccatcacctcttgtctggaccacagcaattgattcccattggtctctctgcttttatgcatgcctcactccagtgtcttctttgcatggccaactaatctttttagaatatgaatcgtgtcatgttattccctagctaaagaccctcagtgatttcccagtgaatttagaaaaggtctagattttcttaacctggcttgttgcagcaaactcaccttattctattctccctttagttctttctcttcgaaaacatggcaagtttctgtgccttagatatttggtattttcttttccctctgcctgggagattccttgcctgtctctctgcaaggttttgacataaacatgacatcctcaaagacttttcctccgaccacactatctaaagtatctcctggattatttagttcagttaatattttcttttttccctttatactagtacatggaactttctcgtttgtttctttactctctatctctatccattagaatgtaagttccctaatggctgagacttcatcttgttcgtggatatagtctcataacctagaactaggatgacaatataatttattttccaaattgggacacttttgtttgtgctaaaataccatgatgagtgagatgcaaggataataggtgtaagcacagactacaccaggaaaatgcggatttacagtcaagctgcctagagcataagctgacatctagttagccctcaataatgaactgttaaaaacagttacagaatcacatgctgctaagtgaaggaagccagtatgaaaaggatgactactgtatgattctgtttataagagattgtagtgaagacaaaactatagcaatggtaaacagatcagtgattgccagggcttggggaagggaaagagttgaataggtgaagcatgggggattctttaggacagtgaaactcacctatgtgatgctgtcatggtgaattcatgacatcttgcatttgttaaaatccatagaactttgcaaacagtgaacttcttatatacaacttttaaaaaatcacttaggaggtcaggggatcccaggatggaatataggctacaacaaaagaacttaatgtgttataaatgtatatgataacctcactgaaggaagtgatagggttggggttggggaggtactgacctaagtaactttggaaatgaatggagactggaagactaaagccatagtaactgcacataagcactgttctatttggtaaagctttcccttgcctggctctctgtaaggttttgacacaaatatgacatcctcaaagatgtttcctccaaccacgctatctaaagtatcacgtataataggagcaagctgaagaatgctgtaggcaatgagtggtatgtgggaggacccacaggcaaaaaacaaaagattgcattgcaaaaacattagcaagtccagtatcttatatccatcactctttcttcacatgaaagctctttctttaagagctcctgaaaggactgttatgattcccattttacagatgaggaaatcaagaccctgagaggtagtgcttttcccaacgacatacaccctattggtggttaaaacagaacagggagcccagcctatcagactctaaaacctataccattcctctcatgttactctccatttgcttaagaatcctatagaagtcggctgtagtcagtttctcacttctgaaaatgaacaaaactgagtgtgtatggagctaacatgcagatcagtaggggggctgggaaacgttgaccatggcagccgctagttctcactaagttgctctcacaagcagcattctcttacttgccaggaaccagagccctatgaaaccagaggtcaaattccaacctatgaacccaagggaaattatgtatcatgaaaatatggcctgggaagtggaaccaaaaaaaaaaaagtcctgttatggaaaggagaatgagaatagtagaaggaaaggcagggttggagacagactgtactgggactggggtggtggagagatgagcaaggtgagcagctcagtctccacgtggcaggtgcccccaggaagaatcaagagttggcccaacgctgctcatttaaatggctctgctgccacctctacctcccacctccttcctcctcctccatcaccactatgtagcaagctgctaaaaaaccaggaggaactgtccaaacctagcacctgcctaaagaggatcatggttgtcttccacctgctgggcctgggaacagggcaacattttctggagtaggataggaaaagagataccgtagcctgaaaacaaactcaagtgctagacttcagcattatagcactgataacagagagtccataaaatggcaaaaaaaaaaaaaaaaaaaaaaggccaaaatactttttcggaacacccacaccaatgtaggaaagcactcagagggggttgaatatttggcaaactagttataatggatcataagctcaactgcttttaagctaaagggctggggataagtttactaatgaaaagggatggcaagtataatactgtctgatattgttggtcaaaagaatgtgaggcttgggaaggggaactggtaatctgttttgtccctctgtcccagttcccaggtggaatgattcctaggttcagcactgtggcatcctttgtggccccttcagccctcctactcaggctccagaactggagctgatttgtcctgggtcccacccacctagaggatggccttttcagagtttgacctgttgtttgtgtggtcgtttgatagagggccagaattttctctagggtgaattaaatttttgggatccaggtttggggcacacccagtatctcctaatgacttagctaaagagactcaattttaccgcacagatggagtcaggcatgttgttctctttccaagcaagctggaatcaaagggaggtgtggtacaggctcagaactttgaagctggaagcaattgacatttggatcctggaggaggaaggggaagtatttgtggttcgatgtttacattggctcagataacagggctcaaacagttgcggtcttactttctcatcatcacgccctcctgcatcagcctcacggagctggctaagtagggtcctagagacattcctcactgctgacctttgtcctggctgtttctaacacaagcaccattagctgtcctgtagcataggatataaaatgtcggggagtgggggtggcgtgagagttcaccaggtcagcctgctgctctgactctgagtcctatatagcattctctgttaattgtttgaagttctgtgcaagaagatggcaccactctgaaatattaacatagaatggggctacttgggggaaaatatatgagcaatgtaagtactatgaattcttttttaagaaaacatgccagaaggataacacttctgtatgaatacttcaaggtacttactgaagcaagctgtatactggtaccatcttgatcctaacactgagcacactgctggagctcatgtttggaaatggtcttgggggacttgctacattcctttgcatgccatcaatagtgagtcttcattcttgaaggacgtatttgatttgaggaagagccaaacttcataataacctcaatctagaatgataggtaatttggcagagaattattgttttgggtagaaataattataaaacctttttttctcttctaacatcatctttctgactgacatcacagagtctaagattttcagttttggaaacatttggagaaataatgaaaggcattccaaaagaacttcatgctgaatgccatttggacaatctaaactcagtcctgaatttggagtatcaatatcatctattcagggactgttaaaaacatggtatttcaagtcaataaaattagtaatagtaacatttgtgcaatacttttaacttttcagagggcctttggaacccgtatttagtggttaccaagttccaatgaggcaatatttgatcacaaagatgtttaacccctttgggtataaagaaagggacttaaactaacgtttgatcctctgattggatgaaaacttaacttttaaaatacatactatcatattttatggtgaagtggttagaaacctcggctggggagccagcctacctgggtttcaatcttgcctccatcaattacatagctcaaattaaccttttagaacttcaattttcttctttgtgaaatggaaataacaatagtacttacctcaaaggattttttgagtatcaaatgaatttaagatatatacattgcacatagtaagcactaaaaaaatgtccattgtgattacccaatcacactataacatagcagggcagatattctcaatctcaattttatttgattggcacaacgatcttgattgagatgtgaaaatgcgcgaaaaataaagagtcagagtttaaaactttctaaaactccctgtacacaagctagattataacaatatctgtttttcttttcagttactctagtgaacaatacactctcagttttagaacactgtgactaaataggaatttgtaaagcccattgttatttcttacttttttcttatcagaccattcctgaaaaaagatttaatacacatggatgcttaaaaaattataagaataatgcagattgataagacacatgcattctactgtatgttcattcaaaattaaagcaaagggttgcaaattcatttcccagagaatctgttagaaaactttgtaggatttttggttatgcaaataagtgaaaatgtcttcctcaattaatgctattaaatttggggtttagatggtaaaatttaaattttaggacataaattacttcatttttcagccaaaatgctgtgatacatgaatgccttgtaattgaagagaagtcacttaattcaattggataatctggccaagttattcagtcactttaagtctaaatttccccatcaataaaaagaggttactaaaaatacttaatattaggctaggaaagaatatatgtgagtgttgtgaacaaatacctggtagtcatttgcctaggtgtgtctgttagggagcgaattgttctgagaaataagaggtgatatattgaaaatacttagcaccatgactgccacatttaagctctcaataaagaagagctatcagtattactattactactgctatgatgactgctactactatccttcgagatctcattcaaatgagctcacactctccccagttgcaataaataatttggtcaattatcacaagacgctatattttattatatatgtgcatgtcccaagagctgaaaaggatccacaagcattttaagagagccccttttactggttcaagagttaagatttatgtgtattcgtgaacatagtgaagaaaattagcttgggctggaagagaggagagggtatggaggggttatgactcctgtgtaaccctggtttctgggacatggcaaggaaccaacagagagaaattgtgagaggggaaaattctgcttactgcagagtgcttaagactaaggagccacggtcgtggggtggggatgatcagctttatgcctcagcacagggtatagagaagtcccatgcagagagaatgaggggtgcaacccatatgtccagctcccaacccaccagctcaaggcatcagggtctgaacaaagagggttcagatgaacagaaacaaaaatggtcatttgatagacccatccagatggcctgagccaagtcctcctggagctcagtcaccatctgcctacaatgccttccatccaatcccctcaaagcccccaagtcaccttccaatgagtcccatagtaccctgtgcatcttagggtaactggtgcactatgtaaattcaaccccccaaggagagacagaaaaatgattctattttttccctgcattatgctctcaaatactgtgtttgaatgtcccagaaatgcatttgttacatttcgtctgaagctgaggatgggaggaggatggagggagcagaagtgcctgccctcagccacatggagtggggtcccttacctcaccctactctgtctcctgtgatgggcttctgctgaaactgtggtctctgtgttggtgaacagcaacattttttggggggtggggaatgttcttcacctggagacacaggtaccactccgtgcccttcctcactctccaaggccctctgaaaactaggaagaggaggaatttgccccatgttcttcctgggcatacaacaccacattgccttcatgcactgatggctcgcaagaacttactgccttaaaaatctcaggacaaaaagcagacagcactccatatattttcatatgccctcaactttagggagcccagatacaactctcttgagtaagaaaagtccatgatccactaatcagacagctccagagaagactcatgggtccctcagcacagcactcacccagatgagatgcaagaagcaggactcctttgtcattttacatccccaccaacagtgcacaagggtttcagtttatccaccaacatgttattttctgttgttgttggtttttttttttttttaatcagggccatcttgatgagtgtgaggtgatatctcactgtgcttttgctattgttgtctttattgttgaggttatgagttgggtatgtattctgtatataaaccccttatcagacatgatttgcaaatattttctcccattccatttctctcagtcactcagttgattgtatcctttgatgcacagaggttttttattttgatgtagtccaacttatctattttttcttttattggcctttgcttctaatatcatatccaagaagtcattgccaaatccaatgtcataaaactattccttttgttttattctaagagttttatagttttagctcttacacttaggtctttgacccatttgaattaatttttatatatggcataaggcaaagtttccaacttcattcttttgcatgtgggtatccagttttcccaacaccatttgttgaaaatgttatttccctgtattaagtggtctgggcaaccttgttgaaaatcatttgatcagatataggagggtttatttctgagctgtctattctattccgttttttctatatgtttgtctttatgccagtaccaaactgttttgatttctatagctttataataaaattcgaaatcaggaagtatgagacttccaactttgttcttctttttcaagattgtttggctattcaggatctcttgagattctatatgaactttagaatggatctttctatttctgcaaataatgcagaaattttgatagagattgcattgaatctatagctctctttgggtagtattgatgccttaacaatattaagtcttgcagttcatgaacacacagtatctttccatttatttgtgcctttaattttttcacaaatgttttatactttctacttaacaagtctttctctttcttggttcaatttattcctaagtgttttactatttttgatgatattgtaaatggaattgtttccctgatttcctttccagattgttcattgttagtgtatagaaacacgctgagttttgtgggctgatgctgacttaattctacaactttactgaatttattaacagattttattgttgttttgttttagtatggaatccttattgttttctatgtataggatcactttgtctgagaatagaaataattttacttatttctttccaattttgatgtttttaatttcatcttcttgcctaattgcttggactagggcttctagtattatgtttagttgaagtggcaaaaatgagcatacttgccttgttcccattcttagaaggaaaacttacagggtttcaccattgggtataatgttaactgtggacttttgatatatgatctttattatgttgaagtagttttcctctatttctggttgttgagtgtttttatcataaaagggtattgaatttcatcaaatgctttgtctgcatcaattgagataatcatggcttttttttttgcttcattttgttaatgtggtatattacatgggttgatttttgtgtgttgaaccatccttgcattctaggaataaatctcacttgcttattgtatataatacttttaatgtagtgttgaattctgttcactcgtattttgttgagaatttttgcatcaatatttaggaatattgttctgttgtttcctctttttggatggtctttgtctggctttggtatcagtgtaatattgggttcatggaatgggtttgaaagtgtttcctcctctttggaagagtttgaggagggttggtgttaattcttctttaaatgcctagtagaattcatcaatgaagccatttagtcctggtcttttcttttttgggaggtttttggttactgattcaatctctttcctggctataggtttattcatatttttttttcttcatgattcggtctttctgggttggatgtttctaggaatttgtccatttaagatacattatccattttgttggtatacaacagtttatagtactctctgataatccatatttctgtaaaattggttgtaatgtcaattattcaccatatttttatattcaggctgttcagtccttgtccatgttgagatatttagaaacatttttcccttcccaaagtgagtgcatcagaaaccctttattgaactgaacataaaatagaaaagcactggaccccttccatcatgtggaaaaccaaacctgggcacgttcactgaaaaagatggacctggagaaggaggcagcaaaggcaaggccaacaggttgggaactttggccaccagggctgggctctgagggctgaccctgaatgttgaatgaggacactcggtgagatgtagcagtgtcttcaggcatggcatgggtcacagaggcacagtggtcccactcatcaaggcagcccagagcctacagtgtgaacttaaaccaggccaagggggtctgagggtcccacatgcatatttagagcccagttctggcagatgtggagctcagcagaggtgtagtgtattaatatacagggggacttgtcttacagggctgaagcctggccctcattgtgctcttgaagaagcagagtctaggctgggggtccctcagtgagcttcttcaggacagaatggaggtattcccatttcctgccctatcatagtagtgaccaggaaaaggctatggagaaccatgagtagtatatatgcagaagggagatggccaacttttgtctcatgtagccttcctcctccagttatgaccctgttctcacagaagcaaattcacaattggaaaaggcatgccttactccccactatggacagcaaaattagtctgttattttcacataagagatgtccttctacttgcccagcatgatttcagatccctattttcagcactttcattcccacctacccctaaacaaccaagaatatcccttagcctcctcattagacaacttttctcatcacccacaattcatgcagcttttggcacttagcaggtgtttgattgataggtgctgaatgctggattctattattgtggcccttcagagtgccttcgctgagagaagatagagaagaaatgtgttctctgctgagactgtaggagaccaaagggaaatgtgtgtgtcaataagtttttcctttatttcattcttctcataaaaattcacctacccagagaccagtattctcatttgaagccttttgagaaggaacacagcagatgataggcaatgccagctagcaattttttttcttcaaagcaggttagcaggttcaaataaaacacattggagaggaattacttaaaaccaaaacggaaactgtgaagtgcaagctgatatttttagaagtttgtgtaatgacaggtcagattcctgaggattagccaaagtggcaaatctaacaccacttattcaaaaagggggcaaaagatatagcaggcaattatagtttagcagcaattgtggggggaaatcaactcctcttgaacttattgagaaaacagcttgaaaagtgtaatttgaatatagatagccaacaagaagatttctacaaagagggggtgggaaactgatggagtgaagagaggaagggagaggagttgccacaggttcattattttcatattttaaagccctgaacagtttgaaaaaatgattgccagaggagaccaggaaaattagtggttgtctgattcaggatcaattttcaaatctgcccagtttataattgtgcaacttttgctgtcatcactcatgtgactcagggtccagatgttcagggttgaaatgtccccagggcttgccacctccctggtatgtccccgagcctcccttttttcccccaccaaacatttttcccctgtacttatttctttatatacaaaatgcctgcatgggggcttaaaaataaaagggaaaaaagaaactcttaaatccagagctcaagcttaatgtgcattatctttggaagaagtgatgatgattaaatctgcactcagaaatggggggccaagatcttattttttcgcaagagcagatttttatgagaacagaattttgggcttttgggggaatgagcaagatatgggcatgaaagagaggaggggagcagaggagacaaatttggataacctgatggttttcatcaagactcagttgtctgggtttgtttttttcatttccaacctttggaataatgggagaacttcagagttgggttcaaccattgtggaagtcagtgtggcgattcctcagggatctagaactggaaataccatttgacccagccatctcattactgggtatatacccaaaggactataaatcatgctgctataaagacacatgcacacgtatgtttattgcggcattattcacgatagcaaagacttggaaccaacccaaatgtccaacaatgatagactggattaagaaaatgtggcacatatacaccatggaatactatgcagccataaaaaatgatgagttcgtgtcctttgtagggacatggatgaaattggaaatcatcattctcagtaaactatcgcaagaacaaaaaaccaaacaccgcatattctcactcataggtgggaaatgaacaatgagaacacatggacacaggaaggggaacatcacactctggggactgttgtggggttgggggaggcgggagggatagcattgggagatatacctaatgctagatgacgagttagtgggtgcagcacaccagcatggcacatgtatacatatgtaactaacctgcacaatgtgtacatgtaccctaaaacttaaagtataataataataataaaaaaaagattatttggtccagctttcctttaactgggttcagtcaactcttggggtctacaaacataatcttaagagtctacaagttctttgtgaaattttaaattctatattctcattttgttgatgagtattgtattataatattgaggacctctgaatgaggacctggggccatgtgattctgggactgtgtttatgttggtcgaagggatcacccaaagggaacttgtactttggcttgtctgactgcgagtaggttaacaggacctgatgtcaccatgatggcttccaacctggtcctctttgtactcacactaaattctttgccagacttactttccattgataattttccattaagagacactttcataggctatgctgtttgtttctaaagtttttaaattaataaacacttcgatgtcatgaaaatgatgtcctgtaacagatgactgaaagaatcaggtttaatagataaattacacattttgtaaagttaagattaaatattatcaggtgtgctacatgtttgaaagtttgcagtaattttaaaagagaagagtcatggagaagttagtgatcgcataacacacagatgtgtagccataccaaatctgaaagtaatcggggtatagccttcaatgctctattcatgttgggaatagcagcttagtttctgccaaacaacattatttgttattttaaattaatgcattttattatcttttgagtttcatttctattttctattcacttagtgaaaagactttatagctgttcgatacttataagaagttatacccagttttatatttgtacaaaacataaaaatgtgttaagtcaacattatggatctgccaaaaaattttcccattaaaagtctgtctataacttaccccggagcaacactaatctggtccattactctcatttaaagaaatgatcttcttctgttttacgattatgtctcagtgttggaactccatagtcttcccaaagaaaactcaaccatcttgtttacataaatatagtttattctatattcttagtgtaattagactttcgctgttcctgcatttgctctgttccctaccccgcccccaccagtgtgccctacatctactacagcaaacttctgcttgtgtttccagatcagcttgtcaaaaaagactgcctcttttgtgaaaccattcttcttttcctggcatggtgagtggctctcttttgtctcctacagctttcagtctctatatctcacgcagtgctcttcaaggtcattgaaaatatctacttacccctgaatgtctccatttgagcttctcaaaggcatagacctagccttactcacaccctattctaatccatggctcattgttgatacttaataaaagtctattagataagttttagacctctctataccaaaataatacatcctaataaaaccagtcatcacaccatgctttcccagacccagcctccaatggcatccttgcaagacatccaagagacatttattcagctgctagaattatttttattgaactagagcatgagaggaataaaacaaaaacagaggggaaattctccagctagacactataaagatctttggaatttacatgcagaagtgggcaggcggctgtctctagggttagcttttgaccttgccatttgtgtttgaggaaaagaggttggaagttaattcttgtttgaatctggccttgcgattggccacaagtgggagggattctctctgtaggaaatgatgccatcacattgaggagttgtttttttgggctggcaaatggaaaatgttcttaatgaaaacacagaataatcagtccgagcgtggaggagaagcactgggaggagaaatgagaaagaatccatattaaatagatgtgcctaccagcatactgatgaggaaagggatttggaggttattgtagggggggaagaaatcttcaagttattatcctgatgcttttatgtggcttaaaaagtgaatatatgaaatgtgccacaagtggaaggaaagtgccaatcactggtgtctaaactagaggtgtggtcataatttttagagtcatgatggaggccaatattctaggctatcacctagctgaagccctaaatgtatttttatttgtcagactatttgtccaaatttttgtttagaaaatattgtatcaatacaatcctaagccttgatagggtgttccaagtatgtcacttatttcttcctataacactttgaggtaggtactaatatttccctcattttactcaggaaatggagtcaccaagcagttaggaaatatgcccaaggtcacataactagtgggtggtggagtctattctacccacacaacctaactccagagcccaggctgtccagccctatcctgtgctgtctctacagtggaaagaacatgggctttggaaccagaccagtctacatgcacatcttgaccattgacccttgacacaggacacgttatttaatgtttctgagcctctgttttgtcatcgactgaataggaattacagtatttaactcacggggttttttgtgtggattaagtgaatgagtgcatacaacattcctggggcagtacatagagtaggtaaataatttccccacacctagatcatccttgctttaggaatcctcaaaccagaggcttcaggttttaggaatgagacatgatgtgtgaggcatgagcctggtttctgggcaggtgtctgtgagaatgtgtatcccacgaggctgaggtcccagtgatatcacggaggggcgtgtgaatgctcagagtcagggactaatgtgattgttcccctgcctctgtatgttctcattaagaagatatgggccgggcacggtggctcacgcctgtaatcccagcactttgggaggcagaggtgggtggatcatgaggtcaggagattgagaccatcctggctaacacagtgaaaccccgtctctactaaaaaaaatacaaaaaaattagctgggcgtggtggcaggcgcctgtagtcccagctgctcgggaggctgaggcaggagaatggcatgaacccgggaggcggagcttgcagtgaaccgagattgcgccactgcactccagcctgggcaacagagcgagactctgtctcaaaaaaaaaaaaaaaaaaaaaaagatatggcttaggaaaatgagaaaaacgagactttaagctgcttcctcaaatcttttatgctttccgcaaatacctctatagcatacacaaatttagctttcacagcgtgagtgattcactcatgtcctgtcccaagctcatagtgtcaagtaaggttgaagtattaccttcttggggaaggtcacagagtaagcaaccgcacattgatggtggaaggtggatgcctagaacccagtgttctcccagcccaaactatccatatggggcaatgaaacagacaccaactcattgggagattcttggaatcatttcctctattctagaaatttcagggtctacagatgcagaattgtctcaatctacatttaagcccagagtgaatgaaccatcaggtggcaccaaaccacagctcagaccagaaaagatgtggactgcatagccagacccctcctggagtgcctccaggtgacatgggcagagtctacctgtcatttcattaaccttgggctaatgagagactccatggtacatgactgaattttttggacaccacttatgttattatgggtttttaaatatgtgctgaatatctatttagggaaatacatgaaggactagggattccgaaacaaaataataaacacagtccccaccttccaggatctcatggttgaacagggagatagtcaaataaactagtaaaacatggcgtgaccagagctgccaaggagggaagcaaggaatgctctggggcttcgagggagacacaggaggggactttgaaccacctcccagaggaggaacagaaggatgggagggcattgcaggaggagggagaagctcgtgtgccagcctggaggctcatggtttgctccaggaagtgaagagaaggagcatgagactgagatatgagctcaaacaaggagaggctgggttacgagggccccaaatgccacaataagaagcttaagctttgtgcagtacacaagtaattcttaaccttttctggaacatagagtagagtagaatttgtggtccttttctctggaaaaaaatgtacagtgatgcacacacatatatttttacattttacattgaacttcaggaagtgctgtagaccctctggtacccattatgtatgtttcctaaatttaaaatcccccactagcagtaggagagatcagtgaaagattttaagttgagcagggctatgtctatgggatcacaggaccaataaccactgaaacaggaacaaggatgacagattggaagaagtgcagcctgtaggcaaggaagatggggccacagttagaagtctgttgcaaaggtttagaccaaaccatggttttgttcaaactcctccatctccaaagctttcgttaggtgatggaaaagatgcaaaacccacttgttgaacttagagcattttcagccctacccccatcctttctggcaaaggtatcctggtccttaaccgcagccagaagggaaggcaagagaagggcagtaagagaagctattatctccaggtggcactgccaacccctggggacagatcgttgataccttggaaatttatctgtgagaatgtttctggaacaccttgtctgcctctaataaacacagtggatctcgcttggaaaagaggaagtattccagtcatagggcttcatagagccctcctggttcttctgcatgtagaagcgggggcagggatgtggagagggaagcgtgcattagtttagcaaccgagtagggatttagggatctgaactcaatccctgctcttcctgtgagaccctgggaaagggtctctgtgctattcttcctgcatctattaaatgggaataacaataaaaatgctaacctgctctggaaggagtaacgaggaggggattataaagcactctgtaaataccgtatgaaggtgatgcagcagtgatggatggcggcgttcactgaaagaaacagcagaattacagccatcctcgactctctggcagacttttgatttctcccatcagaaaagaccctcccagaagctctgagaagagggcgctctgcatctctctcttgtctgctgcagctatggatgttgtgaaagtcagagaggggaaaatggggagaaacagtgggaagggatcagagggttgagccagccccaccacctctggaaatagctgcctgtgcaagccagggctggctacattgtagatattttttaaatgtttcaatttaattgaatttcactaaacccagagagccattagcactcgctgtccacccataaagtgggcaggagctgctcagaatggcttaggttccccaaacttacattgtggtttactgatacgcccatccatccaattccacgcctgctgccttttctttaggatcattcttacacctgaataatgtggaaatgatgagccctgttggaatgtaaaccaacctgacgttctcttcagactcccacaggcttgctccacagagggatgccttgttgggcttgagtttttttcaagagacaggtttctcaccatctctgtcagttgctctggaatgtaagaggagggtggttacaggtaacagattatttttaattctgccttgttatttggaactggttttccatatgttgttgttgttcaattccttgcatgaattttctcaaatatttgtaacatatgtcatatctatatgcagattttaaattatggatgccttcatccaatcattttcaaaaggggaaaaaaatccaagtctaatactctcaggcaggaccacagtctcctgggcatcagatatcgttcaggtagacacatctggtgaaatgcatcacatcaaattagtatcaagggtattgagactctgagactacaggcagacaatccccttctaatgtactgctttttagattgttggggaaacttgaatcccaattctcctgtgaaatgagtgatactaacatgcctgctcaaatgctcaaagtgaagatcaaagctgcggtgtccaaattggctttgcaaacaaagcagcccttgctcccccgcttggggatactgtgctaattttatcaactctccctggctcttctgctattaaatagcaataaataaatgtttttttttcctgggtttgccagtggcttatttgtctgacaaacaagctcatttccttttaagtgtaaggttttagtccaactaatagaattaatctatttttaatgaaaaggagactggcttttacttagaaatctacctacccatctccctctctctgcaccaggccccacccccagcatcttctctgaacacatacatccagccatgaatatttcaatacatctcgggcattcagatcaatatatgcaactctcaagccctattgattttcagaggtttgactcgcaagggtgataaaatatttctcaacttatgaaacctgagttaaagaggttttgctgacccttcaacttttatcagatatctttgtctctttttctttcctcctcccatattccttctgctcagtctccctccctcacctggtctcccctctccaatgcccaacccccccccacccccccgcttcccatacaaagccccgagatggagatttatgactaagcaataagtcctggagaagcaggcactattttcccactgggtccacctcaggtcagagggagaagaggccaagggaagagagcagccctgagcacaatccagcccccatccatctcacctgggggactctgccagctctcctcctgtctctctgattcatttatcagcacagccgactcctcctcctgcacacccctgaagatgtaatcccagaaggcgaccctagcaacatacgaggaattccccactgaggcacaggagctgagctgctccatatgggtacgaaataagctaattatacagtcagccatgtccaatgccaggatgcatgttgttataagtttatccagcctagttatgaagcagtgagcccaaggttcttggaaaattttcctgaaggtttggtggttgatctactgtgatatgcattggattaggtgtttggagatcccagttcagatttctctagctagccctgggatgttggtcaagtcgagtcactttccttcttgggccttcatttcctcatttgtaaaatatattcatccatgcatttatttaacacatctttgttgaattcgtcctatttcccaggattaggggatagatggtgaacaacaacatgaatatgcgtgtctgctcgcatgaagcttattatctagtgaggatcagccaaggatctatgaatgtttctccctctgcactcccacgtggcatgcctctggatactgcaatacaagctgtatataagtatgttattacaatgttttttatctgatccctcgctggattgcatgttgcaagtcaggatggatagtgcttagaactgtggacagatgcttgttcactggataatagccaatgaagttggccctttatattttgtgtcctgcccggtgttgaatagggctgaggatgcaattgtgtatgcggagcctcaggggaaacacattcaatagccgttgatcctgccctaatagtttttcatcccaagtctttggtaaggaaaagcacataaaaggacttataatgagcaagttatcaagttatcaatgtcagtaagttgtagctgcctctacactcgaaagttaggaatgaccagaatgactttatcaccaaacagacagaaaccttgaagcaccatcctgtgttgggtgaaagtgtgctaggatatgtgggtgaggagacggcttattttgtataagggcagtgtgatgcccctgttctccctaggggttttgagcagcagggcactgaagaagtgatccatatccccatcacattgtgagccctgtgagggggacagaggaacttttctgtttcatgatgacacccatggaaagagaaaaaggtttcaaatatgattccagaattagaggcctcaaggcaggtgctccgagctgatttgctgtggagctgcttcttgcacaggcagctctaccgtgtgaggcagggctctatttatatggcagtgaaggagactcgatgattcttccactgatgctgggtgtgggtgggataccctgaaaggtaccaatagacgtttctccggtagagcaggattcctttgacatctgctgcctttgcgctgatgagttctctaatagacaagtattagttgactatcacatcataccacagacactgttaaatattgactctaataggtaatctaccatagattagaattttatggtttacaatgcactttgatcatcactcgttcaagccctcctactttaatagtgaagaagctgcggcccagagtggtgaagtgacttgcttaaggtcaaatggtaaaactgaagtaggacagaggtctcctgactcccagtttagtgctctgtctgttgttccaaatatcacaccatcttttccaggcaaccatggcagaattttaaaaaggaatcataataataataaaagattttggcccatttggacgcttttctctgaaaacagggagctcacgacatatgatacaaactgaaaagctgaaagtgatttctcactcattggggcattattatttatgttttgagatggagtctcactgttgtctaggctgggctgcagtgatgcgatctcggctcactgcaacctccacttcccaggttcaagcaactctcctatctcagcctctcaagtagctgggactacaggcacccaccaccaagtccagctaatttttgtatttttgtaattttttaaaggcagaaagagttttctggaattgattggaaaactggagcacagactttacggagataagggaagtgaaaaacagccaaagacgtgccatgggaacagtctcatgagaatcatatccccagacatcatgcctgtggccaccggcatctccatagtgaacctcaccccagaccttgccctccctgtaccacatacaatctctaacctcccctaagatgtgaaatgggaccaaatttggcttccatagagttataaggatgagtgaaaggaaagggaacccctgcaaacttctctgccttctggtaagaatagttttcagattttgggcagcccaaagaatgtgtactgtgaagaccaaactacctcttcacctttcttccagttggggtgcttccaaaggcatttcttgaattatgtgggttttaggatctgtgtttaaaagctcctctggattttagtattttttatagagatggggtttcaccatgttggccatgctgatctcgaactcctgacctcaagtgatccacccaccttggtttcccaaagtgctgggattataggtgtgagccactgtacctggcccattggggcattattgttgaaacattcaccctcctctgcttcctggcaccagggaaggagtgctcttccccacaccatccatgagtgtggcaatgtaacatgcttggccaatgaaatgggagcagatgttaaagtaccactcctgaccagagctgtgctccttcccttcaccatgagaacaggctccagcttcctagggcctaaaatggaaagacacaacacagtgctggacctagcctggagtagtgctgctgaagggctgatctacagactcaagggcaaggatataggtttgctattgagagattttcagtgggtgagcaggtagggagggatgaggggagggtgcttattatacagcattatcacagcaaaagcaaagatactcaaggaggcctgaccttagctatttctgtcttaccctcacttttcacactgcagtgcacaagttcagattgtcactttgttttccagatgagaagattgcatcccagtcagattaaatgctctttataaggtcatcttaggaaaacatagaggcatcctgttagctagaatccgtgtatgcttcctgactttcagaatttagtttcctgtgttatttaagcatgaggctgtcattgtctttgaggttagagaaagaactaagcaatttagttttgcctgtgtcatctctgtcaatcaatcagtcatctgttttctatgtctgtacctattatctctatctatctctatcatctatgaatctatctctatcatctaatttatatctaatctaaatccatcatctatcaatctctaacttatctatatctatttctatcatctatctctatcatatctatcatatctatctacctacccacctacctacctacctacccacccacccaccaatcctccgtctgtccatccaactatgtatttgtttgaactaggaggagagagtctgaaagtcacattgtgtttactgttgtgaggttgacattttagttgatcatgttgaggttggtccgtctgcatctgattatctcgtttccagatccaagcagttgttaatgaaacagttgctgttttgttgacagaacattaattacttgatcttaggactcagtaattgcacaagcctcctctgtatacattactaattacattagcaattatatggcattttaaagacaaagaaatgactgaagcaattgcagtgtcacaggtaacctgctgttagatttcagtcacatgcctaatgtccccatgatgtgcagaaacaagttctagtggatcttgtgacacgaacttgaagaaatggcctaagatttcctacctatgaactccctgctcagtggtaagcccatcgtctaggcagagacaatgtggataaaatctctttaactctctcagcctcattttatttctctattaaaaataaaagcagagaaaagttggataagaaaatttacttatcaaacaaatatttattgaatgcaactacctcaggtgctaggaatatgacttcatgaagtttatcatcttttgaaggataaagacattaagcaacaaatactcaaatgtctgcaacagtcagggaaatgcttgttagctgctgtaaaaacacaaccccagaaatatctggagttcactacaataaaattgtatttcttgctcacaccctaggcagctctttccaaatggtgactcaagggtccatccatggtgtggaatctttctgttattctgagctccttagtttccagctgtgtggacagaagagccagtcaaggatcttgtgggggctttagagactagatctagaaggggcatacataatttttcctacattccatggctaaaattggtcacagggctgcttctttgctgcataaaaggctggaaaatgtagaggaaaaggagaaatgagcatttactcagtgctggctgtactgcataattataaatggtgacccgtgctgtaagggaagtgtaggtagtacagtgagagcatgcaatgggacaacccactaattttgcatccagcactcgttcccccttctgctaaaactgcccatattgccttagggaaatgactctccttcattgtctgtagtttttgtggggctgtcatttaaggttcctctccacctcaccccactctcatcagacatgggcatgtggtatgattaagaccaattagattctctccttggaccgtaaccttaactggaacaacacaaagacacaaaaaagttggatctgattcactgctatcaaagtgctacagacagactgtcaattcttgtcatttggatccctggatctcagttcctgtcctcttgagcctatttttagctttccctttgaatctctccatgacctcaaattgttccaattaatttcctttcttcttgggttaaccagttggttctgtgcttgcagccaaataaccctaactgatacaggggtataatttaggttatgaggtttagagaaggcctctgtgaagaagtggtatttttgctgataagtagagcataagttggagttaatcagacaaagagtggagaaaattatttttagggcaaaagaagccacttatgcaaagggcttgaggtagaaaaagcttgtagtgtttgagacatgaaaagcctgtctagctggagtttgtgcagtgacagaaaatgacataggatgaggatggagaggtggggcagtaacagattttccatactttggaatgatatggattttagattttattctaagtgcaatgcgaagccttcgaagattttgagagggaaagagatatgatccaatttacactttaaaaaagcaactcaagctagtctgtgggagacaggtatgatggggtgagaattggaaaaggaagataactcagcggtccatcagcttagatgggaggatgacagcggcttgtcttgatgactggccaagaaaatggagaaaggacagacttgggatatgtattgggatcgaattgacacaccttgatgatgagtaattttgtggaggcagggaaaaggaggcttcaaggataactttcaatttccataggtaattgatatggtttggctctgtgtccccacccaaatctcatctcgaattgcaaaccccacgtgttgagggagggacctggtgggaggtgattggatcatgggggcggtttcccccatgctgttcttgtgatagtgagggagtccttacggttgataagtggcagtttcccctgcacgtgctctctctcctgtcaccatgggaagatgtgccttgcttcccttcaccttctcccatgattgtaagtttcctgaggcctccccagccaagcagaactgtgagtcaattaaacttctttcctttataaattactcagtctcagggagtatctttatagcagtgtgagaatggactaatgtggtaatatttactgaaattaaaaaacgaaaggggatcggccgggtgcagtggctcacgcctgtactcccagcactttgggaggccaaggcaggcggatcacgaggtcaggagatcaagaccatcctggctaacacggtgaaaccccgtctctactgaaaatacaaaaaagtagccgggcactgtggcgggcgcctgtagtcccggctactcgggaggctgaggcaggagaatgacgtgaacccaggaggcggatcttgcagtgagccaagatggtgccactgcactccagcctgggcaacagaccgagactctgtctcaaaaagaaaaaaaaaaacaacaaaaaacgaaaagaggcataggtgagggtggaggaactaagaattccttatcagcatgtgaaattggaattgtcctggaaacttcaagtgatgagtcaaatgtcgacacatagacatggtgatcagaagagaaatcttggttagaggtgtgagtttagatactgtgtgtatagacatggtgttagaggccatgggaagcagtaaacaaaatatttctaaagtcctttcagctctggtaacttctaaatccatcagcctggtgaataaacaccagaattccacatctacctgcacacctaaccagctggggactctgttgtatcccacaagccctgtgcccattaaggggtcaacccatcctgccctcctcagctggactacattagaatgtctccctcattccctaaacttgttcaaagcctcatgcccacttaatttccctgcatctttctaatcgctcaccttactttctgtatgaaatagctccacaaacttgaagctgattgcattcctctccagcagcccctggctccctgtccctggccctcactggttcaggtttatgggttatttcttcttccctagctgagccagcctcatggcctcagagacgctgccctggtttagttccaaccttcaagaaacagcaccaggcccctgtataccatcatggtgccctggccactggcctactgcttgctagaatggaggggatggggtaaagtgaggagacagagcagcagatgctggtccctgggaccccggcctggtgacctgaaactggagaagctccccagacggtgggagagtgtgagaggtcctcctgacctctcccctccccatagccctgggtcagcttcctctgtttactgaaagcacgtatgtgaggaaaacagggcctggctggggcggtgcgttggatgtgggagaatttgaactttatcagtcctgacatttctgcctcggtatgtgtgattgttgttacacatatggattggatcaaatgagataatttatgcaaaagcactttgaaatttttagagagctatccaagatattgcatgttgttatgattaccattacatgggaaagcctttccccttcaatatcacccaagtgtttgattaaaattaggtggcagattggcaaatctataaagtgctttcttgtgtagcctgtcacctatacctacggtgaccatatggcctacattttccaggatggtgcagatttcacatagttctagtcttcactgcaaaggtgatttgttaaattcctaactaagtctcctgcaattattaagcctctgcaagacttttctccaaatatgttcatgagaataaaaacctgtgtcagggcgggggcggtgtctcatgcctgtaatcccggcattttgggaggctgaggtgggtggatcccttgaggtcatgagttcgagaccagcctggctaacatagtgaaaccccatctctaccacaaaaatacaaaaattagccgggcatggtggcgcatgcctgtaatcccagctattcgggagactgaggcatgaagatagcttcaacctgggaggcagaggttgcagtgagccgagattatgccattgcactccagcctgggcaacagagagaggctccatctcaatcaatcaatcaataaacctgtgttaggccacattttcgaattttttgagaggtactcacctctgtatttcttatccatgtgcaacgggaagtactcagagaactcagggcatccctgttcctttgagggtcccacctgggcaggggagggaaatgagaggacaatcaattttccatgttatataaatgcaaggactaaagccagagtggtctgagcattaccatggcatcctgaggatggccactgggggattttgtttaggatttcagtggaaagggagaagtacaaggactgcccacagtgcctttgacccttgtcacttctctgtcctctgttgctctctctcttgcttttgtcattcagccctttccagtgggtggctccatcctgaagggtgggctggctgcagatgcctattccaaggagtcatcccaaggagccggctcacggtttcctcatcacctgatggaggaagatggagcagcctgttggccacagtgaggggaaggggttggggatagggaatggggttgcatcagcagcagctcttttgattctccctgtccacacattctccatttccactggttttaggaataagccatgagctgaaagtaagataataagatggcccagtagacagtctactgttgccttcaggtctgctcttctttattttatttttatatttatttttatttttattcattgattaagacagggtctcactctgttgtccaggctggagtgcagtggatgatcttggctcactgcaacctccacttcctgggctcaagagatcttccctcctcagcctcccaagtagctgagatttacaggcacacgccactatgctcagctaaatttttttttgtatttttagtagagatggggtttcactttgttggccagcctagtctcaaactcctgacctcaaagtgacctgcctgccttggcctcccaaagtgctgtgattacaggggtgagccactgctcccagcctgctcttcttttaggggagagaaagaagcgtgtggatttctgccctggcatttcacttcttgatctgttccgaagtagcttccaccaggcccctgagacagatttcataaatggcaacaccgttttcactgcttcctccccttttcaacactttcaacactttctgttttggatcaacttttacctaaaattctagcatgggagctgggagatatcaggaggtgcagtggagagattgcttatagtttgtgagtcaagataatttctgtgagcaagaggccttctcgaagaagcacacaggatttgcatccagagtttcaatgaattccagtctagactctactaccaataagctctgtaacccagggctggtcagtgaactcatgagaccttacttttctcaactgtactaggaaagaatattcgttccttttagttccatggaaaagctccgagaacaggtcaccttttgtcctggacagtctttactgagtttcaatttcagcttttgtatttctcatacagaaatatcatggttgacaactacaattttttttgctcatatgaatcagaggtttgatgactcttggaataaatcctgataggtgcttggtattttcacacacctttttaattttttcatggaaactcatcttccaaacaactttatagggataaaatgagataatattcacaatagcgtctaacaaagaatgaggacaccaaatctcacagactcacactttttacttaaagtcactgatatggtttggttctgtccccacccaaatatcatcttgaattcccacgtgttgtgggagagacctggtagcaggtgattaaatcatggggtcaggtctttcccatgctgttcttgtgacagtgaataagtctcatgatatttgatggttttactaaaaggagttcccctgcacaagctctttctttgcctgccaccatccatttaagagatgactttgctccccgttgccttatgccatgattgtgaagcctccccagccacgtggaactgcaagtccattaaatctttgtcctgtataaattgccgggtctcaggtatgtctttatcagcagtgtaaaaacagactaatacagtcatcctgctcagaagagttctaattattatttcaaccctagtatcatggctccaagaccagatgctcttcccagtacattgcagcagtcctgttccaaagttgatgttcttaaaagatacatgcacaaaacaaaaagctaaaatcctattattcaataattcccaagactcctaaaattaaaggttagagatgagtaagtcattttgaaaagtgactcaatacagcactgtttgaccaggaagatgtttgaaaagaagtaactaagatatgatggtcaccgttctgacttttgatagcattacagataatttcacttcaaacaagtgtgtagtttattcttcagtattcgggctggctttgggggctttgaagaaagtctacagtgtagatgttacagaaataaactctgttttctgcaaagggcctcatcaaaggcatttagtacaactcattccccaaaatcacatgtattccaatcatgtggtataaaagatcatggatccacagggggcagtattttgaagatcaaaaggagaaagaactaatatttttgattccttatatatgccagaaaatgaaaggggttgctttcacctctgttacctcctttaatctccatgaacccaccatgaggcaggtaatactgttccagttttgccggtgagaagactaaggctgaggaggacaagggcttactatggttacttggctagtgaagaaagtggaggaaagtagaggagccctgctttctggcttgaacagatgggtgtacagcattgtaatttgttgatgcaaaaaactcaggttggaaggttttgggggagaattccaaactttatgttggacatgttaaattgagctttctgggaaatatccaagtcagcagctgtctcaacctcagaagaagaaatagaaatttgagagatgtcagcatataaatgagtattaaaaaccaggctcagggtgagagtataaactggcacaacctctgtagagaggggcaaccatatactttatccaaaccagacacttttaagagaaaaggtgttgttattattaactatgttgagacaatgtcttcagcaaattagagcagttggacattctctttatagaaggtaatctggcaagacctgaaaattacaaatgcacaaatgcattcacccacttctgggaacttatcctacaaatatactcatatgtgcaaaatgacacatttattaaatattatattaatagtagaaaaatagaaacaacttaaatgtcaataagtagaggaatggccaaataaaatatttacattaaaatatataatatatattaaaatatatattaaaatttgtaacatatagactacttctgggaaaaaacacaagaaattggtaatattgattgcctccaaggaaggaaattagatggctatggacagttgtcaggaggaaatttttcattttaccctttggactattttgaatttttaatcatgttaaaatattacttcaagaaaaaaaccattcgtttaaaattgaaaatcaataaaaaaaatcaagctaaaccttagcaatctgtagggaaaaaaaatgtattatgggactcgcagtattttatacttcttacaaagtaagaactacaaatacattacattatgcagaaatagtctccactttcatgtatgataaccaagatacctaatcccagatgaacagagtgacactaaatgaaagatggcaaaatatcgtcgaccagcctttccgcttaatacccaggaaagggatatcttagcatccagatggatggtgacaaccagcaaagccagcagaaactagaaggggagagattccttcctgctcatggatgagtgaccaggaaatgactacatgggtctataaaaatgttctgcaaacacagagattaaggacatagagcccaagagtcattgaaagagcatgtcatgttgaaagaaggattttctaaataaaaacaaattttacatggtatcttcattataatctcaaaacttcataaaaagtcagtctcaatgaaacaatatataaataatttagaaaaaatcctactaaagggttagtctgaaattaaataaaaagagtggtatataagaataagaagaaacacatacatacacacaaacaaccgcaaattgaaaatcaaaattaaaagctgtaaaaagtttcagccaagatggaatgactggtaccaggctagttcttcctcctttaacaacaagaaaactagacaaaaatatatgaaatatctcttttttagacattagaaacaagcacagaaggactatcacaatgagagaaaggaaacaaaagtggcaagcccacaattgctgtggctttctgtctagaggcactttttagtgcaggatggaggaatccaagcagaacatagcaagttgatgagttgaggaaacagactgatgtttagatggtctaaggtggctaagagttgtgagagactattggacataagctggagaaagagaggtagtgacagacggagacagagacacagagagatatatccagaaatctgtatcagggcttttttgagtctgatgctgaatattaagccacacatatatagggtgcaagtccacgaggccacacaaaatctactaccggagagccgtaaaaatgaacaattggcagagctcacaaagaccttgagagagattcaagttctagccatccaaagtagagaggcattgaacacctgaacattcagtagagatcccataaaggtcacatcttagtgataggactaaatatactctagaatcaagactattctagattttcccttacagagcttaaggaaatccacaaaggattacactaatcagcaagtcatttaactgtctttcaaaacaaaaaccaatactctaaagaaagacaacaaaattcaaacacttggcaatgttatattcaaggtatccaggatccagtagaaaattactagacatacacagaagcaggactatatgatcgataaccaggagaaagatcagtcagcagaaagagatcacacattatagagataatgagatttgcaaaaaaaaaacaactttaaaaccgctattctaaatatgttgaaggatttagaggaaatcatgaacaaatagggaaaggaagatgttaaaatgatcaattttagaacttgaaaatgtgtgatctgaaatgaaaacattaactgagcctcagtatcatattatatacacagtacaagaaagtatcagtgaccttgaagacagagcaatagaaactcttcaaactgaaacatagaaaaaactgaaaaaagtggacagaactaagtgacttgtaggacaccatcaaatgatcatgtaattaagagtttctgaaaactgcaaaacattactgagaaagtttttaaagtatttaaataagttagggatatacaatgtttatcaaaatgctcattttctcaaattattctatagattcaacacaatccaaatctcagaaggtgttttgatagaattgatgagttaattctaaaatgtgtatataaatgcaaagttttaaagtagccaaaacaattttgaaaaaggacaaagttggaagactgatttcaagacttactataaagctaagaccagtgtggtattgtcatgaaggtacatatatagataattgaaagaaaagaaaaaagaaataggcccacaccaaatatattctcaattggttttgaaaaatgtgccaaggtaactcaatgagaaaagaatattctttttaataagctgtgctggaataatgaatatctttataagaaaaaaggaggacgaagggaaggaggagtagttccatccatatttgaatccaaaagaaagtcacttgaaatcataatttaaacataaaatctaaaacttcaaaagttccagaataaaatgaaaaaatcattacagcattggatacatttgataactaggatacatttgataattttcaatatcattcctgacttttaataaaaaattttaaacattgtggtacaaaaatatttcttaggatgcataaagtactattcataaaatttaaaagattgacaaatgagactttaccaaaatttgaaatgtcacctcttccaaagacatttcaaatagatatatatagaaaaaaaatgaccctagtcctaaacctcatgctttcataaaaattaactcaaaatggatcacagatttaaagacaaaacataaaactttacaagtttcagaagaaaacttaggagaaaatcttcaggatctagggttaggcgaagggttcttgataccaaaagtataatctgtaaaagggaaaatggataaattgaccttattaaaatttaaaaatttgttctgctaaagatcctgttaaaaggatgaaaagacaagctacccactggaaagaaatattgcaaaccacatatccaacaaagaactactattttgaatacatacagaactctcaaaactcaaaagtaaaaagaaaataaaataaataaacccaaaactccaattagaaaatgagctaaggccaggcgcgggtggctcacgcctgtattcccagcactttggggggtggaggcgggccgatcatgaggtcaggggattgagaccatcctggctaacacagtgaaaccccgtctttagtaaaaatacaaaaaaaaaaaaaaaaaaaaaaaagcagggcgtggtggcaggtgcctgtagtgaggctgaggcaggagaatggcgtgaacctgggagttggagcttacagtgagccgagatcgcgccactgcactccagcctgggcgacagagagactccgtctcaaaaaaaaaaaaaaaaaaaagcaaagaaaaaagaaagaaaatgagctaaaaacatgagatatttcactgaagatggcaaataagcacctgaaaagatattcaacctcactagcaattggggaaatgcaaattagaaccaaaatgactatcactacataccaatcacaatgactaaatttaaaaaatagtgacaagaccaaatgctggcaaggatgtgaagaaatgggaccactcacacactgctagtgggaagtataaattggtaccaaattactaaaagcctaacaaaaaagcatgatattaataaattagaccacaagacaaaaacaatacggaccatatataattctacgctattcaattttaaaatttcaatttatgcagaaaagtttaaagtgataatattgacacaggataaaataaaaattcttaattattcaataaaaatgggtaaaaaggaaacagctgtcagtaaattatctccaaaagggctcctagcccagaagtttttctgagcaagctttacatttttttcaagaaaaataattctctcctgttatgtaagcttgaaaataacaaaattattccaatttatcttatgattctgcaggtctctcaagaacacaagcttggtactttgaaaaatgaaaaatataaaccaatcttacttttgactagcaaatcatatctagcagcttatttaaacaaataatacagcataatcaggaatgtaaaaatagcttgatggtgaaaaaatctattgatataattcatcatctctataaaatcaaaggagaatgaatcatgattcttactagatgccaaaatacatttggcaagtttcaatatcattcctgacttttaataaaaaaatttaaaaagatacctgctagccacaaagaatagaagacttccttaaccagattaagaatatttatgtcaaattggccaatatcatgttcaatggggaaacctggacattaaaatcagacctcaccatatgagcttgccatcattattactactttttaatattttcctggcactcttagtcaacaataagtcaacaaaaagaaacatgaagtataaatattggaaagaagagaaaaattgttatttgcctcagatgacaaagacaatatctttgattagtttgaatttttggaaaccaaactctccttattttctgctttttgcctggtattatttcatccctgaggcaatgagacactacctattatttgcttgaaggagggagaggaagaaaagggaggtgcgttatatacaaaatacatgcacatatagacacacacacacaaatatctgcagaatagacattaaaatattaacaatggccaggtgcggtggctcatgcctgtaatccgagcactttgggaggcccaggtaggaggatcacttgaagtcaggagttcgagaccaacctgaccaacatggcaaaacttcgtctctactaaaaatacaaaaattagctgggcatggtggtgggcacctgtgatcccagctactcaggaggctgaggcaggagaatcacttgaacctgggaggcgtaggctgcagtgagccaagattgcacacctacactccagcctgggcaacagagcaagactctatctcaaaaagttaacaagacttatttcttaatggtaagattccaattttttttttctttatgcttttctacaatttccaaattttctacagtgaacatttattagttatgtagtagaaaaatacacattatttttcaaaagccaaagataaataaggggaagaaaggtgttcaaattgtagcagaaatggctggtggggagttggaagaagaatccaaaggggataatatgtgcttgggatatattgaaagaaccatggctttggaagcagaagactggagttccatcactggtggcatcgcttataaatgtgataattccaggcaagtcatttgactctggtagccccagtttcctttggggaagacccctactacccattcttcatgtctcccacattaaggggcttccatggagaaataggactttcaccttgtgtcacctgcagcttatgggtctaccaaccaggcagcacaatttgcccaggacagttaatgctttttgtcacatcatatttattcatctcttcccttttcactctccaaagtctcctagttttaagcaatgcattgatgtggtcaccccactcacggcagctttgttcatgagaaaaaaaaatggctgtttttaggcagttttaaacaaacgtggactttagcaaactctaactgctacagtgagcaaacaggctgttggggtcttagttaaacccacttcatgatggctaccataagctttgcctggaactaaccaggcacagtgcggcattgttgtctttaagcatcagtaagcagaagtgtgcttgcagcaatgtggatcttagccaggactgcatgccaagagtgtaaatggcatagacagcgcatgatctacagagcgtagaggtgtcatgcctgccttgggctggcagggtgggctcaggtatcctggtgctgttccccttcctgttgctttgcatcttgtctggaagggtgaaaaatgtggttggattcacatggcttgttggcacattcaagaattcatcccaaatttggttctcagtttgttaaatatgtcagcactgaccgaaattttagatatcaggacccaaattgtggcttaccccatagatctttctccttccttcaaatattgcaggccctctgacaatactcattactggattctgaaaaaacagtctgctcaaaaacctgttctgatggctggggattacttgtggttctgaattatgtggaatatgagactgaggctataataatctgatgtgtcctattaactctttgaactctttaaaaaatgtggctcatgagaggtcatgaaggagccacacccattcccacagaaggcagcccaggctggggctgctacagacatcagacccaggccctctggtagagactcatcagaactggaaattgggctgggcatggtggctcacacctgtaatcccagcacttttggaggcctaggtggatggatcacttggggtcaggagtttaagacctgcctggccaacatggtgaaaccctgtctattaaaaatacaaaaattacccaggcgtggtggcgggcacctgtaatcccagctactcaggaggctgaggcacaagaattgcttgaactcgggaggcagaggttgtagtgagccaagatcacgccatcgcacttcagccaacagagtgagactgcatctcaaaaaaaaaaaaaaattggaaatgaaatgaaattttgaacacttttttgcatatcaagtcatgggaaaaaaaataaaaatttgtgttggacttgacgttctttggaattttaattgtacattaaggaaatttaactttgggctttaattctttggaacctaaactttggactttccttagaagaagatttgatttttggacttcaagatctcacttggaatttccagatgaaagggagtttgtattcaaatttggtctcctctgtgttgccggaattcaattattgagtattttatattgttatttaattacattgcagaacctccaaaaaacattatattagacaatgtagctgaacattttggcggcagggagtgagaaaaagactaggaagtgaatttgcccttacgttagttaaattaatatgctctttggatccatccagagtcttctgagagtcatttctcaactgtccaccttcaatcccagaaggattctccaaaggaactgtggctagtgtgaggggactggcctcagaaagatgggagtggcactgttaggacagagagctcccccagagaaaatagccacaaccttgggtgaccataagcttaatggttaaacccagttggctaggagaacaaagaactgggatgctttaagagaaatcactttttatcctttccgtatgccttcatgagtaacactcctggcgccctggcccctatccctcacatccccatgagaaggagggagttgtagcctttggcatatgtgatctgttgggtagagttcatccatcaaaagactgtcagcatgagggatttgctctcatccctcctgtcttctagttttagttaatgcatctgctgtggtcccaaactttcacttggacggccaccccagggtctacactagtgtgtgtcgtgtgtgcctgtggggagtgggttgggtagggaatgttaacaggctcatggcatacctcagccatgctccccaataacgtgtattagtaataaagtcagcattttcctcttcatttgcctgactcctgttctaccctgtggtaggttctgaacttgggcaagaacaagcatattagtttgtttactctatagagcccccagtaacgctcatctttaaagtctgaataataagccccaccactactcccatcatacgcagctgtatttaaaggttaagcagataatggatgtaaaaatactttgtaaattgcttatcattccttagtttggtcaattcttgttgttacttgtattagttctaagataaccgtcatctcctttgcaaatgagaatttaaaatgacactgctcactgcagtgtagtcatagtgtgaatagctcccacttcttgacttcctgttctgcgctgggcactcaagataattctcactctgtgcgtttcttgctttattgacaacatcacaacttttctcaaaatgttgggaagaatatgaagttcctgagaggacattgaaatggaggccaacaggaggccctgggtgtgtcatttttaaccatttttcataaatccaaaaaaggggtcacgtttattatggctattgccttacgcaaggagagttgtaggcaggggctactcctactctgtgttcttcttcaaggttggatgggggcatagggttacccactttgtctcttgcaagttgatatctctgtgtgtcaacttgccattagctattctgttgacacccccgtacagccccagctgcctgtgaaccctatcccacaagcagagataatgagacagtgctacgtatataacctggtctgattagagtctcagatctttgcacctcaacagctgtgtgttgtcaccaatgaaaatttttaactcgtctgccaattccctggttgcccaaataagtggctgaaagagtggctgctgttccatcgtttattagaacagaatttaggttctgataaaccctaatgctgaaaattagctccgaggaaactgcgactgtggttcttggtctctggctgataggaagaagttagaatgtattcaggtggggtttttttatcctgtagccagttcagcactcaaattacttctgagctatttttaaaaacgtaataggaccaatacttaggagagccagatgcagtgtgaggaggatcagaaagcatctattacgggctcgacattcgctctcccacaaagcctcggatgatattggaaaagctcttcgtggtcttcccggcggcttaaccacgtcgctggaatcctcggggtgctcgcaaaacttgccatggatggagaagccgttttagctcgtgaagtcatgttggaattagccttttgacatcagcaaagtcacaggcgtcactggcttttcagttacattgagatgtcgccccgggactataggggtgcaatctaccctttcaaaatgttggagcctgagccttctttttgaggtctccaaagaaagaggcttcgcatttttggtagcatgttcaagtgtctcacacctgtttcagacaaagacagttatttttcaagtgcattctagaatttttcttcttgttctgatattgtggagcgtgaaacctcttttcatctccactttcctctgattcctcatgcaggattcttggaggttgtcattggttccactcccttggctttttccttttcagactaaaatgagcaacagactgagaagaatacactgtgttcccagctggggagcagaaagaaagaggaggaggccactgagggaggatggaagatgcagcccctggcctcgttggaacgtgccatccagtgaataatttcttccatttttcctccagcaggaaaaggtgtcttttttctcccccaagctgttgctcattttggccatgtccttcccaaacctttccaagttctctcaattcttcatttccaaagctcagtttgaatctagcacagaaaaacaataatcttattttaaaagatgtttaaattcaaaaactataacatcttgcttatgttattttaaaattacagtgggaaacaagagcattggtggcagggctagattctggctgtgtcaccacccggctctgggacttctgccgacaaccctaatttgtctcagcctcagttgctggtaaaatgtggatagcaacagccgattacgggcttggtaggagcattagaggctaagtgtgggaggctccttgcacttactgatttctttttttaaaatagaaaattataaaatctgaatcctattgtctttttatgaattaaaatgcacaggcccatggttttcatgaacagcagtagtgtactcagtgctgcgactgttaatttctcagcccttcctaggcagggctgagtctgtccttccagctcccacagcccctggctcatgcctgttccccaggaggggccatgttgtagccgagtgttgataaacctgcctcttccatgcatagtgaggctctccaagcaatgtcgagccgtccactcatctgcgcacttgtgtgctggccttgccgcttatgaagtgcattcatatggctgtagagagtggtatgataagataacggagacagagaagggtgaggggatgaagggggcagaatgatgagaaattgattagtgggtacaatgtacattattctggtgatagataccccaaaagccctgtcttgatcactacaaaatctatgcacgcaacaaaattgcccttgtaccccatacatttgtacaaattaaaaaataaagcatgttcacaggcactgtgacattattatttcagtcttacagcaatgccatgagctagttccttaggcccattttacagatgatagaatgagctcagaaaaaccaagccattgttccatggtcaaaaagcccatgaactaagtcacttgaatgtgaatctcagcttttttttttttttttcttaaggtgaattttgtgtttctgtcacctctcagccccacagtcctagggttctctgtttcctacatctggcactatctcttttacacacacaaactcaacaccctcctctgtagccaggaacttaaatcatccccaggtaggactgagatggcacgagggaagaccacgtgaggatagagtgaagcggcggctgtctgcaagtcaaggagagaggcctcagaagaaactaactctactgacaccttgatcttgaacttccaggcaccggaactatgagaaaataaatttctgtagttttagcctcaaaaaaaccgtcatctccaggtaacctggaagctccagtaatccccaggtttgtgaattcttggagtgccattaacattgctgccagctctgatggaaggaatcagggtacaagaccatgacctgcccacagagtgccaggttggccctgggaacctggccagcctctcttcttggctaactctgggcaccagaaccttgtctgaaataattctgtggtagctatagaaacatcttgagtggtcttatactcccaaacattatatagatgagaaaagtatagctaagaatggctgaagccactcagtggagcagactcttggtccatggccctgaataaatccttgtggtggctcctgacatgacatcacacttcctcttccccaagactcttagcaagtgcacataacaagctggtcttcatgctcacctggaccacagcttttttgtacactcacctcttctccgctgtgcgtctgtgttgtcctccttatctatcctgggacatacctgggtgcttttcccaagcctttgctgatggacagacttgctcaaggttctgtgtgagcagaagcttcctgcctgagttcttagagaagcatggttggcatccctgtgctaagaaattctttctgcttaccggtctctcagagggaaacagctctttctgttgactcttgaccctatagttttacatgttggttgacactggaagcttgtgttctctgaccagctgtgcttgtgctatagggagaggacagatgctctgtgtcccactcctttaggacaaaatattggttccaagataaattgattcccgggtgctcgcaagcaaggacaccacaacactgtctctatcagtgttctttctgctgatagaagactggactttcactgttttccgactttgtctccagtgatgcacgggctcactgtgtgtccaggaaacagtttcttgccggcatcttcacctgaagtagaggaggaacaggatgcccccagagtcctcgagggtgggcctgtgtccactgggggcagggtgttcctttccatctgccgatctttgggcagcctaaggacaccagggtgggggcaggaggaagaggaaccatggaggcaacataggccacatctgtactgaggctcagacagtttcccctttggctttgtctttctgtgtctgttgaagataacacttattaaggtagaatcaactataataatctgcacctatgtaaagtgtacacgttggtaagtttgggcttatgtaaacacccatgaaaccatcaccataatcaagatcgggaatatattcttcaccctcaaaagtttccccaagcccattatagatcagtttgcagtttctagaattttatataaatagaatcatatagtatctagtgtttaaaaaattgatatgtaatttacatacaataaaattcacttgttttaaatatatatatttgtaaggactctccagagaaacataatgaattgtgtgtttgtgtgtgtggggggagagagagagagagagggaagaaaatattcagttttgtaaaggaattagctcacaaaattgtggggtctgaaatttgtagggcaggccagcaggctgaaaactcaggcaggaggagatgttacagtcttgagatagaatttcttttcttggagacctcagattttgctccgaagacctttaactgattgggtgaggcccacccagattattaagggtaatctttttatttaaaattgtgccaccatcatcgcaatctaattttagaacagtcccatcaccctgaagccttaaacactttttcctttggatttatctttctgtgtttcttttttaccattaaggtcatcagtacaaaaggaactagacacctctagtctaattcttcagctcttctaatctcatttttttcctttatttcctctaacaaaatgggatacatgtgcagaatgtgcaggtttgttatataggtatacatgtgccatggtggtttgctgtacctattgacccatactctaagttccctcccctcgcccccatcccccaacaggcccaggtgtgtgttgctcccttctctgcgtccatgtagtctcaatgttcaattcccacttatgagtgagaacatgtggtgtttcgttttctgttcttgtgttagtttactgaggatgatggcttccagcttcatccatgtccctgcaaaggacatgatctcatttttaatggctgcatagtattccatggtgtatatgtaccacattttctttatccagtctatcattgatgggcatttgtgttggttccatgtctttgctattgtaaataatgccgcaataaacatacatgtgcatgtgtctttatggtagaatgatttatattcctttgggtatatacccagtaatgggattgctggatcaaatggtatttctggttctagatccttgaggaatcaccatactgtcttccacaatggttgaaatagtttacattcccaccaccagtgtaaagcgttcctatttctccacagcctcaccagcatctattgattcatgactttttaataatcaccattcttactggcatgagatggtatctcatggtggttttgatttgcatttctctggtcagtgatgttgagctttttttcatatatttgttggctgtgtaaatgtcttctttttagtagtattcctatcctttgacaactttttgatggaattgttttttttcttgtaaatatgtttaagtcccttataaattctggatattagacctttgtcagatgggtagattgcaaaaattttctcccattctgtaggttgcctgttcactctgatgatagttccttttaagcagtgcagaagctcttttgtttaattagatcccatttgtcaattttggcttttgttgcagttgcttttggtgtttttgtcatgaagtttttgcccatgcctatgtcctgaatggtattgcctatgttttcttcaagggtttttatggctttggattttatagttaagtctttaatccatcttgagttaatttttgtataaggtgtaaggaaaggggtccagtctcagttttctgcatatggctagccagttttcccagcaccatttactgaataggaaatcctttccccattgcttgtttttgtcaggtttgtcaaagatcagatggttgtagatatgtggccttatttctgaggtctccgttctgctccactggcctatatgtctgttttagtaccagtaccatgctgttttggttactgtagccttgtagtatagtttgaagtcaggtggcatgatgcctccagctttgttctttttgcttaggattgtcttggctacacagggccttctttgattccatttgaaatttaaaatagttttttattctaattctgtgaagaattagaatagtttgtttgatgggaatagcattgaatctataaaacactttgggcagtatggtcgttttcatgatattgattcttcctatccatgaggatggaatgtttttccatttgtttgtgtcctctcttatttccttgagcagtggtttgtagttctccttgaaggggtccttcacatcccttgttagctgtattcctaagtattttattctctttgtagcaattatgaatgggagttcattcatgatttggctctctgcttgcttattgttgatataaaggaatgcttgtgatttttgcacattgattttgtatcctgagactttgctgaagttgcttatcagtttaaggagtttttgggttgagatgatggggttttctaaatataaaatcatgtcatttgcaatcagagacaacttgacttcctgtcttcctatttgaatacactttatttctttctcttgcctgattgccctggccagaacttccaatactgtgttgaataggagtggtgagagagggcatctttgtcttgtactggttttcaaagggaatgcttccagctcttgcccattcaatatgatattggctgtggttttgtcataaaaagctcttattattttgagatatgttccatcaatacctagtttattgagagtttttaacatgaagggatgttgaatttttgtcaaaggccttttctgcctctattgagataatcatgtggtttttgtctttggttctgtttatgtgatggattatgtttattgatttgcatatgttgaaccagccttgcatcccagggatgcagccgaattgatcttgctggataagttttttgatgtgctgctggattcgatttgccagtattttattgaggattttcgcattgatgttcatcagagatactggcctgaagttttctttttttgttgtgtctcttcccagtttgggtatcaggatgattctggctgcatgaaatgagttagggaggagtccttccttttcaattgtttggaatagtttcagaaagaatggtaccagcccctctttgtatttctggtagaattcagctgtgaatctgtctggtcctgggctttttttggttggtaggctattaattattttgtcaatttcagaacttgttattggtctatttagggattcaacttcttcctggtgtagtcttggtagggtgtatgcatccagaaatttattcatttcttctagattttccactttatttgcatagaggtgtttatagtattctctgatggtagtttgtatttttgtcagtggtgataatcccccttattattgtttatggtgtcgcgtctatttgattttctctccttcttctttattagtctagctagcagtctacctattttgctaattttttaagctcctggatttgtagattttttggagtgtttttaatgtctccatcgccttcaatttttctctgatcttagttatttcgtgtcttctagcttttggattagtttgctcttgtctctctagctcttttaattgtgatgttagagtgttgatttgagatctttctagctttccgctgtggaaatttagtgccgtaaatttccctcttaacactactttagctgtgtcccagagattctggtacattgtctcttcgttctcattggtttcaaagaacttcttgatttaagccttaatttcattctttacccaggagtcattcaggagcaggttgttcaatttccatgaagttgtgtgcttttgagtgagtttcttaatcctgagttctaatttgattgcactatggtctaagagactgtttgttatgatttcagtactttttcatttgttgaggagtgtattacttccaattatgcggttgattttataataagtgccatgtggcactgagaagaatgtatattctgttgatttggggtagagagttctgtagatgtctattaggtctgccttggtccagagcggagttcaagtcctgaatatccttgttaattttctgtctcattgatctgtctaatattgacagtgaggtgttaaagtctcccactattattgtgtgggagtctaagtctctttgtaggtctctaagaactttctttacaaatctgggcactcctgtattaggtgcatatatatttataatagctcttcttgttgaattgttccctttaccattatgtaatgcccttttttctggtttgtagtctgttttgttagagactaggatgcaacccctgctttttttttgctctccatttgcttgataaatttttctccattcctttattttgagcctctgtgtgtctctgcatataatatgggtctctggaatacagcacaccaatgggtgttccttatccaatttgccagtctgtgtcttttaattggggcatttagcctatttacatttatttacatttaaggttagtattgttatgtgtgaatttgatcctgtcttcatgatactatttggttattttgcacactagctgatgtagtttcttcataatgtcattggtctttatattttggtctgtttttgcagtggctggtaccagtttttcctttccatatttagtgcttccttcaggagctcttgcagggcaggactggtaatgaaatatctcagtatttgcttgtctggaaaggattttatttctcctttgcatatgaagcttagtttggctggatatgaaattctgggttgaaaattcttgagttgaatattggtccccaatctcttctggcttgtagagtttctgctgagaggtctgctgttagtctgatgggcttccctttgtaggagacctggcctttctctctggctgcccttaagagtttttccttcatttcaaccttggagaacctgatgattatgtatcttggggttgatcttctcgtggagtatcttaatggtgctctctgtattccctgaacttgcatgttggcctgtcttgctaggttggggaagttctcctggataatatcctgcagtgtgttttccagcttgtttccattctctctacctccttctcgtactcaaatcaattgtaggttcggtctttttatgaagtcccatatttcttggaggctttgttcattccttttcattcttttttctctattcttgtctgcatgtcttatttcagtaaggtggtcttcaaactctgatatcctttcttctgcttggtcaattcggctgttgatacttgtgtatacttcacaaagttctagcgctgtgtttttcagttccatcaggttgtttatgttcctttctaaactggttattttagttagcaattcctctaaccttttatcaaggttcttagcttctttgcattgggttagaacatgctcctttagctcattgtagttactacccatcttctgaagcctacttccgtcaattcatccatctgatcctctgtccagttctgtacccttgatggagagacgtttcgatcatttggaggaaaagaggcactctggccttttgggttttcagcagtttttcgttgattctttctcatcttcgtgagtttgtctagttttggtctttgagtccgctgacctttggatgtggtttttgtgggggccttttttttgttgttgccttctgttggtttgtttttctttcagtagtcaggtccctcttctgtaaggctgctgcagtttgctgggggttcactttaggccctatttacccaattcattcccatgcctggagatgtcattcacagaggctggagaagagcaaaaatgggtgcttgctctttcttctgggacgtctgacctcgaggggcaccaacgtgatgccagtaggatctctcctatatagggtgtttgacaacccctgttggagggtctcacccagttgggtggcatggggagcaggacccatttaatgaagcactttgtttcttggtggagagagtgtgcttcactgtggggaaacccactcatccaggttgcctgcattcctcagaactaccaggaggagaggttaagtctgctagtccgcagagactgtggccacctctcccactaggggctcatgcccagggagatccaaattctgtccctgatcctctggctggagttactggaaatcctgcaaggaagccccacccaatgaggaaagatgggtcagcgttaggtctgaagaggcactctggccgctgactgccacagccggtgtgttgggctgtggggacaagtcttggggccaagctgtccagtctccctggctccagcaggggaaaagcatagcttggagctatagaaatgggtgccgcccttccccccacccagggagcttagcatgttaggcagttgtgagtcatagtgctggctgctgtccctcccccaaggagctcaaccggcttagacagcaggcagccatagctgatgctggtcgcccttcccccagggatttccattaggcttaagcagattcaagctgagaggctgtaagcatctgtgcattctgtggttgggacgctagaccctggtggcgtggattcgcgaatgggatcttctgatccatgggttgcacagttccatggcaaaagcatagtctccctggcagggtagcacacttaccacctcccttggctgggggaggaggttccccttgcccgtgtggctctcaggtgtgccactgcagcacactgttgttccttctctccgtggtcaatttttttgttgagagagccccgtagtcaattttgatgagaaaacatggataccttggttgctggtgaaggattcacacacttattatgttttttttttttcactgggagcctccgaacgtagctgcttctggtcggccatcttggccctgcccccaccgtaatctcattttagtaagacttttccataattgtctactgattatttattacttatctgtgtggtagaattgaaaaacaatcactttttaacaaactttgatttcttcatttacagtcaagaatattgaattctactgatgtgtgttgatcccttctctgtgttacttgtgttcacaagagtcaccccattttatttttaacctcacgagataaggaagagttgacccatttttgcagaataaggaatggagtctcagagaggccaagagctgacacaatcaagagttcaactgagatttgaaagtagcccttctgattctaagtccttccattgcagcccagctgcctgcttcagacataagctaccctatgtgcttaaaagagccccatacagcatcgatgcacatgactaagccttgctgtgggaaaggataccttgtggaggtctctactgcatggaggttggcacaaacaggcaggctcacctggcatttctacccatgcttgagacaggatgctaaaaaagggcacttcttaaagaaacatggaaagatagatccaagggaaaaagcatttaaggccttggggtgatggagctgttctaaagttaggttgggatagtggtggcacaactttagttaagtagactacaactattaaattgtgtactctatgttggttttgtgtgccaatctggcttggctgttagtactcaagtagtttatgtcgttttccttgttaccattgttggagtcattggtttttggaaaaccaggttggaacatgctggggaaagcatccttcccaggcctatccctcttgtctttctcttgccaacacagtcctccaacaggcagaagcaacctggtgcttctgtgagggacctggagaactttgcctgaggctttgcatcttcttagctccttcccacctcctccagctgctgcctgtgccacaggcgccttctcctctgccgctctgatgaacaacaaggtgcagttccactttctgctgtcatttctcatgggtggatgccatcaatcttgtcttctgtgttctaatgaacctatagcccccaaccactcccaacatcaaaatatgtcctacaggttagaattttggtgctacttctgatttctctttgactgttccttcctgtgcccaaggcctctcagaattccttaactgacctttccatggtactcagttccatgccagaatggactgccatactaggaaacctttcttctgttctctgttggaagatcaaatctatgccatgccctctcttcatttgatctcttcttccactctctgacattcctacttaaaacagtaaaaacaaaaacaaagaattaagaaagagtagggaagctatccatgcaaattagcacaggctcacaaacttggggggccttgggccatgattcaacatagaagaaaaatttagcctgacacataagcgtttccttaggcgtctggacaacctcttccctcatcaacaagccaaccctgccgagtctaaagaaggggtcagttttgtaaaaaccttattatacaggaagacatttctattcagtttccctgcaaaggcagaggtaagtttcccagaagagctagttaatttctttgctcacctcctgcacactcagtgaattccatgaagtgatagattcttgggcctccgcccacacatacaggtataaggacaatggatagaagaaccagttgctttaagttcttaaaaataagaaaatgaagacaccacagcatcgcttcataggcggtttttgtgccttatgccatagaaatctgtatgtcctggattttctaggacaactccaatttcagctatatttatacttgtcaagtcataatttcttattattggctaacaaaatatgatcaccttggttacaggtgagcctgtgttatgtgaggttattgtcataactaatttttcttggatggcgtcaaacatgactgagttctaccaaagtgtatactaaatgagtcatattattgagatgatacagtgcagttaccaggtggttctgctaataattagaaacacatttctatatttcataggaccaaggaaaggaaaacatcaccaggaaaatgttacatgtggggacaattattctataggcccttggctgggatttgtggatatgaacataattcagaggtaaaagtgaaataccagaataatacatggagatttcttctattggtgcagaactacagaatacaggaatcaacatgcagccaagtcttgagtattcaaggaatgatgacccaatttgtcgattactaagacttttcctcccttttcctattctcacagttcagtgatcctcaaatttgagtaatatatttccaaattaagaatttagaattaagaaaaaaaattttaaacctttaaaaggctgtggtgtttcttaaattatttgtaaattatttggaattatattaaaatttgcacaaagctaaaatttaagattcgattcatatgcttttatatatgcttgttttaataaaaataattcacaaagtaaaaaccatcaaaaccacaaaatcagtaagttcaatattaacaacattaatttacagtgatggatgatgttttgctgaaacaacatgggaaagtgtaattttcgcatgtgatcaggagcagaggagaaccaaatattggaaatcagtgttggagatccacaacttccagctcctccactagcacgtaatgcttttttctcaggggtctgtcagccccagcttggggaacactgcttttgccatttatgtagaattgattttcttcttctaagatctgccagggaaagaagacaatgtgaaaccaaaatccaccagatacccttgttgttgctaaagggaatttagggctgtttgtaggtttcaattagataaagttttgacctcctttctggtttctcattaccatggctattagagcagtggtccccaatccctaggccatggactggtaccaatccatggcctgttaggaacagggccacacagctggaggtgagcggcaggtgagcaagtaaagcttcacctgtatttacagccgctcccatctcttgcattgctgcctgagctccgtctcctgtcagatcagcgacaacattagattctcaaaggagcacaaaccttattgtgaactgcaaatgtgagggatctagtttgggtgttccttatgagaatctaatgcctgatgatctgtccctgtctccatcacccccagatgggaccatctggttgcagggaaacaagctcagagctcctactgattctatattatggtgagttgtataattatttcattatatactattaatacaatgtaataataatagaaataaagtgcacaataagtgtaatgcgcttgaatcatccaaaaccatccccctcttctggtccgtggaaaaactgccttccacaaaactggtccttggtgccataaaggttagggatcactgtgttagagcattatccatcaattgcctcttcaggattgccctcctactgcattggactggctatagcacagcaggcagacacatgccttttccagagactcccacattgatttttgaatgacacgaacacatccattaggcctgccttacattgtaagtggatccacttgaaggagcagccaactcatgtattgtgatgtaaatggtgctgttctgcactcagcactttcatcttctaagtgtttcacaaacactgctaattaatagtcctcttttctgtgctgccagggaggagttgtaaggaaagaatgatgggtggctttccagataaacacatgttaatttttatctcaggctaaggggaaagaaacaaacatatagagccaaacacttactgtgtctgccactatgacattgattattgtatttaaacctcacaacaatcttggcaggcaaagaatcttggcataaaggtcttcttatcaccatttttacagatggtgaaactgcagcttgtaaggataattatagtgagggatggaggcaggatttgaactcatgtctggtggtttccaatgctaacactcattctgctactccacagggcaaagagtggaagtttagcatttccaatgtattagtcattatcattattataaacaagtattattaatgtttaatgaccataatacttcaaatttatgtagccctaatctttgagacacttagagttctatgcaactattctgctcttgctcagttcaaaagtggtaatatttggattttgtattagaagtcattttggtctcattcttgttttaagagcaatttttcatgggttcaaactcttggacttgtgaaaatctgggattgaaaacaatgtttgctttgtcctcaaaagtagtagccatgacataccagatgttctaatctctgataagaaaattcttgttaaattttaatggaagaaaatggactggcggttaggacacatcctttactcttttttttttttttttttttttttcctattatcacttacaaagacctgggactatggtttctcctggctgtaccactcacttccaagcacactgagaccttgggaactaattcctgggtatgcggcccattgttctaacctaatttttactgttggatcaaagtatatccatggccaaataatggtcctattgctagtcactcttttgtccacaaatgaactggagtgaaacccgtatcttgactgctttcctttttagcacccatcagataagcaacccgggctgttgagaggacgatgttaactgacccccaaggcaggaccaggtgctgaagtcctgctctttcaaagatgatgaaccagagaatactgtgtcactgcttgttccattcctgtgctggtactggcaagtgggaaagctgggattcaaatccaagtctgtgtctccaaaagtccatgttgaagctgttcttgttgctgaatttaatgaacctctaacacatgtaggtattttacattttcaataaattgttaattttttatggagtgcctgcttttctcaagtattatactatgctaggtgctaggaatatagtagtgaatgaaacagccagaaaaatacattcaaacttcattgagcttacagtctttaaagtacatatatttttaaatttaatcctaataactatttgtgtgtatgcatgtagttatatgtatacacacatatgcatgtatctacgtatacatatatgcctgtgtagttgtccttgtccttgttttacacttgagaagaataatgcagtgatttattcaggattgcatagctaaggattgtagaacttgaatttgaatccagatctctgaatcctagatatttccacattatgacactgtcttctgttcatgaaatgaatggaaaatagggttttgctgtaaaaggtgggctcagttttagggaaataaccaaaaaaccatctccttcaatactcccaatggtgtgacagttcgtgtgcccttcaacagatttccaagagtcaggcaatgaattcctttctgtgtattattcatcataataaacttcagctggatgatcacttttatttgttatttgggaaattgcctgtgttttattatctgtatttggcaggatccaatggagaaagtgatccaatggaaaggatccaatggagaaagtgtcactgagctgggccgcagagctggttatcaagggtagtctacgaagtcagaggtaagcttgacacatggtggtagaatgaagttcacggtgctgtgtagttgtccctttttcttgaattaccgtggggctgacatccagactaaagtgctattctatgacctttctaccagttccctctcagaatcactcaaaagaaaatagagaaatgagaaagagaggcgtgaatttattttttgatgaaactaggaaaacaggttaccccaaatcacaatgtatgagaaaggggtggcaatggctgtgaaaattaaacaggaatgtggagagactgagaaaggctgcttcagctgctgacgtcagagaaagctggggggaaagagtaggactatctcgaaggcccaaaccagcagcctcttgtttgtaacgactgggatgagcatggaatctgactgcagacgttatctctggacctcatctggcagagagatgaagctcagtaggcagaactgaatgaggaaatcacccaaacaagccatagatgtaagaagcggccagttggcaaggaagagtggtctggcaggtgcggtggctcacacctataatctcagcactctgggaggccgaggaggatcacttgaggccaggagttcgagaccagcctggccaacatggcaaaccctgtccctattaaaaaatataaaaattaggcagatgtggtgatgcatgcctgtaatcccagctacctgagaggctgaggcatgagactcacttgaacccaggaggtagaggttgcagtggcccgagatcacaccactgcactccagcctgggtgacagaacaagactccttctcaaaaaaaaaaaaaaacacgcacgctctctctctctctctctctctctctctctctctctctctctctctctctctcacatacacacacacacacacacacacatgcatgtacacacgtaagaattctgaaataagaatttttgttatctaatacatagccctgaccctcccctcccaaacttctggcaaatagctggtccaggaaaaattcacttcaatcaaagataaatgctgtcaaaaaggtatcagaatatgatatatatgcatacactatgggagaggggaaagaaaaaggaaaggaaaacaatggatagttgatggatagtcaccagaaagaaaaaggttctcatggagctggtggtaattctgatcaagctcattgccttaatcattttaaaaaccaatatttctatgaaacaatagctcaatgcagagatgcagcagttctatgaaaatgggcaacacaataaaaccgatgaaatataacctggcacaactcatgaaaatagtgaaagaaaaaataaaagccactgagaaattagaaggaacacaaaggcagacaagagtgagaaaggcaagcaaacagcatgcatttagagaggatgtgacggacacaaatgatggagactagagagtctcacttgtgtctttagaaagaccagaaaaggggaccagaaggaccagaatgaaggaacagagaatatattttaacatcgtaattaaagtttccagaaataaaagactacttgaatctacacattgaaagggaacactgggaaaaaaatgactcaggacaatcaacatccagctatatcctggtaaagggactggcttcccatagaaagcctctggggctgacagacaaaaagatcaagtcacttgtaaataaagagaccatgagctagtctcaatttgcatctgttttccagccataattatgtattgtgtttccctcactctcaaaagtgtcatgacttacacaaaaaaattataggattgccttgcttaaataagtaaaataatagaggagaagaaagtcatggctttagacatcgccacagcaacacagcaaataaacaaaaactcctatgaatcctcaaagtataacccccccaattttagatttaatacttaaccaatagccactcaaatagaaataatctctttttggtgtgcatgaaccaaggagcataattctcctaagtccttcttgattaaactgctagaaaacaaccttcagtgaaccaagaaggaagaggaggatgtgtgccaggtgtgtcccaatttaaaataatttccttccaaccttcccaagatatcccccctctgcactccctacttcagttaatgatatcccgaaatctgattgtctaactggcaaactgggatttatcctagtcacctcattctcttcattccaacacttcactagtcgataactcctgtcaaactgtaaaacgttctctaaaatctttcctccgctttccatctctattgtcatgccttgttcaaatatgagtcatttgtgtttagactatttcaatagtatcttaattgcaggagcaattttaaaacatttcacaactggtgccacacagatgctgagcaattagaaaggacaccagtcataaacaatagcccagaacactggtgctcatcagctgtctttggtctttgcctaattggtctccttgcttctaatatctacattctccaatccatcacattgtagttattatgatttatctaaagtctaaagttgatcatgtcattctgtaagtttctttgagttccattacctgcagtatagatcagtgtatgaagtctaaagtctttggcattgagaacagtcttttaggacatagtccccacctaattcttaaagtttcaaatctaaacactctcacattcagtgcccaacagccactctggacttcttgccatttggtaaatgcaccaaagactctttgagattcaagtgtgtggttaacattgtcctacctggagcaggaatggaatgtacatttctctaaaagatccagattctggttctagaatcacatccgagtgagagaatccacatgggataagttccagggctgagcaacctctccaacaggcgaccagccagaggttgcttcctcctcatttccttcccattttgagttttctctgttaaacatccagccacattacattatagacacacttcataatttttttgattagttgactgacaagagagtccctaaggagtggattctgccagtgatgccattttctgtcgtttgtaacaaatcagtggcctctcccacatgacaaggcagggccacctctgggagtccgaactgagtctgctggttcactcatccaacaagcatgttgagaacctcggtcacttatggggttgagaccgatatggtccctgtccttatgagctttctgtctaaagtggagggagacagccagcaggaaacaaacaaatgaatgcaaagtgtgaaaagggcacaaacagagtttaattacggagaataagaaggggaatctgcatcttaggtggtcaccagaggcctccctcagtaggtgatatttaaactgcggcctgaaggatgagaaggcaacagctatgcacagatcaaaggggagaatatcctactaggcagagagctagttttcattgagaaaagcaaaaacacagtgactttttcagtgtttagaagcaggattgcatccacttatgtgaggagggcaatgcgtgtggtttgaagatatctgtaccctcctagagagaaatgaaataatccaattttaattacacttgtgaatactctggttgaaaaatcacatgtaggatcccgttctcctaagtgtgctttgtgaatttccctttgcatgtctttatgttatccttcccatctggactgctcgctactaacctcctctactgcaaaattcctgctgctctttggagccctggtccagccctgcctccctcaaaggaaccctctctgacagctccaatcctctgtctgggtgtcttctccgagcttctgcaccctctctatcttcctgagtgagctatcgtctgcgtattattttcttccatgagtacacgtctcactcctttcctacgatttaaggagagacatcaagtctttgtgttctagcctgcgattcttcacccagtgtctgacggctcaagatgtaacatttgctcaacaagcaatttcaaatcaggggagactgcccacctacctcaggaatactatatagccaaaatccaacagagcaaacaggattctttcagttttgaggggtttttttatgaatgaatttgaacagatggatatatagatgaatatatacagaaaaatgaacaaaagtcatgctctcctttaagggagtaacttagtacacattccatgtaaacaaaatctatagtaagatttcctcaaatagaactcagggaccagcagttatgagaaaattgccaacattaagaacaaattccaaactaccactccaaaaaaataaaaaataaaaagcaaaggtccactcatttttacagtacaaaaattttatttttttgttaggataatttaaagtttaaaactgaagtagacatattcattttacaaacaagatattctttaagtaagaccattaaaaacagtaaacaaaaaagctgtctttacaaaaagctctgtgcatagcaactttatactgtatataactgacaaagcaaaacaataaaatgaaactatacagtgtgaaaatgaaaccttactgtacaaaaggtagagaagttaatggtttttaaaccatgcatattgaaatgtgcaaagaaaaactgagaagaattacaacgctataacaaaagaaagataaataatgaagtaaattgtccctttaaatgaaaaaaatcttacacagctcctcttacaaacacaggatagagtttgtagttaccaatagaaatactcatattccaagtggcacaaaaataacttgggactggaatgattgaatagcaatgactaacgaggacagggtagctttgtttttaatttattagtacactaaaaataatccttacacacatttgtacaattaaatagctctgttgctgccagggttctagctgaatggtcaagatgtctggtatttagttacacgcatttttcggtgtaaagctaccaagaaattctacaatcattttgaagacagtactgcactcatcttcatgcaaaaggaaaattcacaggttctaaaagcaatgctacttaaaaaaaacaaaatttccttatgttggattggctcaaatccagggctaaacatgcttaattttgctctgccttcacttttggaaggtaacattcatattccacacattcttccccttccatcaatcaggtttctcactgggggactttttctcttatgtttccgtgtattttggcgctttaagccctgactatgagggactgtcagcagtagttataagcatgccaggtttctaaaaccttggattctcatgtgcatagaaataatataagtcatactgggtaattccagaatgggttaaaggcaaataagacagttggggctggatagatgtgggcctgcatcaatgggtcaaagagaaggtatgcagaattaatgaaatcatctaaaattggctcagatgcactcatgatgtttttccatgagtgctgcatctatttctaatgctgaaatcccaaccaagaaccccaaactaagtctgtgtatagactctattgtggtgctcatgagtcaataaggagaaccccaacgtggaaacaagtgacatctttattggcaatcccaatatgcctggatatgtctctaggattacataagctttcaagaatcaaccactgttagcagctaaggcaaggttcttcccctctaagagctagtcacaaaacgatgaagagcccatcaaagggctgggtaactgtgctgcatagaacgcagatgcccctaatctctggatctcccaagaatctggtcttgcctttcttcgaacatcagaagaggggattagggcttttaatatccctctcccacattccgtctcattcttgactagaaactgtcgagtggcatagctatgtttttcaagagagtttaatgccataaaaggggaaattgacagggagaggaaaggacttggatgttctaagactgactctaaagagtccatcaaacagagttatcttctccaaaccgtgttgctgaagttctatggggctgtgtacctctgtactgaaccaggcacccaaagcggagggagtggtggggttctggtgaggaggaattcccaaggggtcccttggttaagaaagtctgtggttttggctctgctagaaggtgaggtgcttctttccttgggatgctgaaagcctgagacagactcaaacatgggaattctctggactgctcaggggagaacgttgaaagctaataataggaattttaaaaagtattcacaagagtgtggactatttagaaatcagacggagctgggaatgaattgatgggttggagtatttgtgcatgtgctagagtgtctgtttctgcattagggtgttctgtgggaatctacatgttcttgcccttgggtcaataaagtgatggaaaaggagggggtgcaggacaggggataagaatctagtaagtaactgcagtaataatcacacacctttaaaacttgttactacatgtttgcatcattttcattttacatcaggaagagaaatccctctctcttccaaaaaaaggtcttaatttctacctctacttacaataagttacacatttatttatttaaataattgtaaaacattttaaaatttttccctttttttgttcattttttaaagagattaagctataagcaaacacacatacaacatttcatcattcaattcaggttgcgttttaagaaagtcttccgtgctggtaccctgttttgttcaatttttttctgcataaactaaattggtatctgaaaggcttcatagaaaatagaaactttcaacttttttttcctacaaagaaaaacaaatagtatccaaaatattaagcattaattgtttgccaattttttcttaaatattttacaaacataggaaggtggttttcataatgttcataacaaagaattgcatttctgctcttagcactgactacgtcaatgacatcttttgtccttgtcccaagagggtcagtttgtgtagccaccatcagagctataggaggacgtgggaccaagtaagatgctggctccttgcagacccaagggtgtccatcatgttcatgtgggggcaccactacacccccaaaagagctcctagtgctttcttcattattggtccatcagagtaagtagttttgtgctataagaaagcagttcttctttacatcgggggtacaacaagtccggtcatggctgcaaggaaagagtggcacaggaatgagacttggggactttttatgttcaaggctatgacacagaatgaggggcaggggatgggaatgatagagtctgatgctattcaaggagatggtgccctcagctgatatgaggacctgttctccaggtttggtctagcagacagcccattaaaggcactgaagccttatggaatcactgaagtacaaggaaaccttgatgaagttttgcctgggaggccaggagttatgttttgttttatatgggttgtataaatgagacaacagatgtaaacatgtaaactaaactgtaatatatgcatatttttttattcaactaagataatttccagattatactgctccaaatcacttagttggaacaggaaaggaaattccaggtgctgagcctgttgatttactagggcatcgttgataacaaatcaagctttttatctatccttcacttctttggtgagtgcattttttttttaattagctcatcttcctttggtgctcactgttcatgtctgatgctcattgcaaatgaacactgatcactggaatagaagacttcatttagtccctcagttcccactcttctttgttgaggtggaatcttgttctgtcacccaggctggagtgcagtggggccatctcagctcactgcaacctcctgggttcaagtgattctcctgcctcagcctctgcctcctgagtagctgggactacaggtgcatgccaccatgcctggtgaatttttgtattgaatggggtttcgccatgttggccaggctggtcttgaactcctggcctcaggtgatccacccacctcagcctcccaaaatgttgggattacaggcatgagccactgtactcagcctccaattcctactcttcatcaccctatatgaatggagtaatctaattctttctcccttcatcgggtcaaaaggattcggacaatgcctgtctgggcagaatcacttcccagggtttccctagatgtggcaaataaagcagcaccagcacaatgtggaaaaatcccacagcaaaatgtattcctcctgccttggctttcagaggataagcccgtgggattttcacattcttagaaaatggcagaatagtttccatgcatcagaacctttaaaatcatatctagaatttgatcctttgcattttactatctacaatgcatctaaggaattattcaatataatagaagcattttgctgagtgttgcttactaagcttccaagcaaatggctgaaattctctctgcttttctcaacccttccatctctctctcctctcttactctctctgccccttttttccacatcagctagtcctctcgggtaaaattgtcagctgtctatttccctgcccatatagcctttattgaatgtttgtgagatctggattaaggtcttacacagctagcaaagccttaattatttttgcctgtattactatatattgaatcaatgtaacttttcaataaaggcggttcaattctggacactccctgatgacttagagatatagcaaccctagtaattatcccagagtgtaggaggtttttttattttattttttttttcctggagggagctggaaaatgaatcagacacatagtgtgtaatattatctcaacaatctatactcatcaactggaagcagctgataaatgaggtagaaggtggaaccatgctgtatgtggagctctctggcagtggaattctgactcacaaactcctggctgggcacggtggctaacacctgtaatcccagctgtttaggaggctgaggtgggaggatcgcttgagcccaggagttcaagaccagcctgagcaacatgatgaaaacccatctctacaaaaaatacaaaacagcccagcatggtggtacatgcctatagtcttagctactcaggaagctgaggtaagagaatctcttattgagcccaggaggtcaaggctgcagtgagccatgattgcaccactatactacaacctgtgtgacagagtgagaccctgtctcaaaaagaaaaatcttcagtcccttcctttttctgggtgctcagagagataccaaaggggctcatgtaacagcagaggtgctcaaagatcaagatcccctgaatgacagaaaagaacagatttgagatatatcccttcctcctagtcctacatccagactgggtaggcctgatctctgctaggtggaaactgactttttgcttgtagaaaccataggcaacagacagaaagtaataatctccctttgaaccaggtggaaagtaggtatgggggtagggggtatagggtaaagagaagaatttcactctcattgtccctgaagacacagtgggctgccagagcacaagctctggaatctgcatgtctgggttcaagtcatcagacttttcctgtgtggccttgggtaaactgcttaactaagaatggtgataatggcatgacttggagataattctcttaaggcactcagttcggcaccttgcctatagtgctcaggatagttagcaagcctcaaagagtgtgggcagcatatgcctttgcagacaatgaagtctagagaagggcccctccccagcctgcgatcacccaggcactcagcccacattgtcaccctcccactgtgtatctctaaaaagatggagctccctgtccagctggtgtctgagatcccaggattttttgtttgtttgttttgttcagtgactgtgcattaaatgtcagcttggtttcctctctctctgtactcaagggaacttcacaatgttggacactgagcttccatgcacctggtctaaaacgaggaagagcataaggtaaggtcactgagggcatcctttgtcaaccctcgcctcctcccagccaggctgtaggaaatatctgttaccttgcctagttcttcacacaaattagtcaacaaccacctttggggatagctgtcgattttctatttaacagactaggaaactgaggctctgagataatggcatgcacagattgacaaggcccggaaagagctgaactagaactcagcacaggactggtgacatcatggccagcactcttccagtggctaatactctttaaggatttctccacacgtcacttgatattttcatagattttttgcaatttctttttaggctactgccctaaatcgacaggtagttctatttttttcctccccgacctactccaaacattttatcttttagagagactacatatggggtacagtggatactgctaaggtaactcgtgcgccgaaatctcaaatcaccactagagaacttatccatgtaatcaaaaaccacctgtacccccaaaattaatgaaattttcttttaaaaaaaaacctataaaaacttttatcttttagagatgaggtcttgctatgttgcacaggctaggctcaagtgatcctcctgcctcagcctcccaagtatctgggactataggtgtgtgccaccacgcctggccccttcttcttttaaaggttcaaatcaccagaggaatgtggagggaactgaaggattcaaatgaggtttgggaccttacagtgactctagaaatgaagctagagcctagagcctgtgcctacatgcaactcaccaagtcattgctcctataaacctatcaggaatgtgctgctcagcccgagcatcctgaggggtggtgaccagaattttgtgtggctggggaccctggagagggtcttctgtttctgctgcagctgccctcacagggaaccttactaagaccaagcaaggtttccttccagctctttgggctggctcaaacctgacttcagtaacagcacgggagtcttgggcatgcagcaggaagtggggtggggatgacaggccctgggagtctgtaagaaacttgtcctggccccattgtaggctcagagccaggtaaaatagagaagatctgagacaaccagctccactttcccgtgagagaggaggtggggaaggggtgatcagtggaagtcaagtatccttttttcctttaagtaacatatgtgctaagtggccaggaatgaggaaagggctgcatccatcctgtctgcctcccgtccaatgcagaggaaagcctgcacccctccttggtctgtctcaatctgcattttgccagtaagacttgctgggcctccactcgggttaaggtcgatgaataaaaccagagaacttaaaaagaggaaacatcaacactgaagaggtcatggggaagaggaaggaaagtacggtaaatattcagcaatcgttttcatttccctgtctcatggaaaaagctctgggcacattccctaaggatgggatggaaaccactggtctttgatgaaagatgggcaagtggagacacttagctacaggctcagcctatttctctaggaattagacatctgggtgaaaatccctgccaaaaaatccatgaagtttccagatgtttccaactacccatacattgggtggtatatagaccccgctgctttctctagtgagaagtaaaataattttcaacaatgtttctgagtactgggttttccattctggttttgacagtttctctgtagagtcacttgacttccagaagacaccatcatctccagtgttgggatggctcaggaacctaacgtacctcccagagctctgctcagccacaagaggagactgacctctcacacgtgtcccaaaagaattaagaacccacactctatcatcaaaccaccaggcagatgccatccccaggacaatgcagcccatccaaggttccccatcaagcactgctgaccttacagcctttgatccatgagggttaatgaaacctcttccctttttagttttacccaaccctgcttgttgtaaatattttcttgtcaagaacatgagaggagcagcctaaaaataatgtgggttgccagtgagccccagtcctcagcagtttccaatgtgctcttttgctgtctgctgccctccatccacaatgagatgatttttcatatactcatcacatttgtgttatgtcatgccatattatattttagaacattgctcaaaaatgggtttgatggataacttttgttcttagaaactatgacttttctattctccacaaccccctaatcaggcacctgctatcaatttgacttgcatgtaaccagaattctcagaacttgttggttgctcctgctggctcctgtccatgtatgccaagaggacatgatggcaagcggattaggtaagcagaaagcaccatgtggtatcccctggggtgactgggcattttctgagagatagcagaatggccttgtggacagcatagggctgggaagtccagacactcctcagttgtattaaccatggttaattccattacctgcagagtttgctgatgtctgttttccctgatcttactttttaaaaaaatttgattattttttgagatggagttttgctcttgttgcccaggctggagtgcaatggcgcgatctcagcttactgcaacctctgcctcctaggttcaagcgattcttctccctcagcctctcgagtagctaggattacaggcacccacaaacacacccagctaatttttgtattttaagtagacacagggttttaccatgttggccaggctggtctcaaactcctgacctccaagtgatccacctgccttggcctcccgaagtgctgggattacaggcatgagccaccatgcctggccccatcttgcttttagatggagcacttgcctagctgtagaagccattcatgtcccatgataagaacagcaaagcatctctttgcaggtaaatggctggagctatacaatgatgtgctgtttgctcttactttgccaaccctatggtacattgtgtatccccaaaatagaacccttgcttacctctgaatccatttccattgccgctggagcaggcaggtgaaggggagccttggggcctgatgacaggggcaaaggcactcttctgtttgacagcaggaaaaactgaagaggaaaatgggaggatggaggatgtgctggaagacccaacggtgggacttgatgacatgactggaaagcaaatgcacaatcctcatttagaaattaagatcttccttcagttcacacatttggcacacatttattgagaaattgttaatttccatgcattgttccagattgcagggattaaaaaaaaaaagttgaatgtgacaacattcccaccatgtccagtgggaggaacagacacataaaacaactaatatggtaatgacgctattagaggaaggtacccaatgcccaagagatgcagacagcaaagggcacttgtgcttgggagagtcaggaaggcagcttcaggaagtgatgttagcacaggtcttcattcacaagcagaagcttggcaagagagaagactgagatcaaacatgcctgaaaaatcatcaaatctacccagcaatggaaatcgctttcacaccctacaaaaaaagtcctatttgggagctatgtgcctcccccataactcctaaggctccaggggtttggtctgtagggttaacatcttctctgagagtgccatctctatgggccacttcctcattaaatgtaaaagtgtattaacattcagaaaaccgtcttcctctcccgtaatttcaagtgctcttgggaaatatagctgcaagtcggcctcccctgacataatgtttagaaaaaacaccaatattagtgatattaacattaaaatgacttaagggaagacaaaagccaagcattataatttccaagaaaaaataaaagcaatttacataatgaagtaccccacctcttaatgtcagatactccaccaagttatatcatgcaagatgataattttatcttctatgttcaacttaagaaaggagtaaactagagtacacaagggcaaaactcttaaatatagcaccttatagtatagttttaggcacttgtgttagcataattcccagaattctgaactgtccaagtcacatgacttgacaaaagtgttgttggagcctaatgaccaagcccagcagtgctatttcttgctttgtattttcaatggaccacctgtccttcaaagtaaattcgaaagtgaggacaagggcgacacttatgactgaccaaccaagtacaaggtgaactgaaggtcaaatgttctgatgtccatggacaactccaccctcatttcccctccttccctataaaaatatattttgggccacgtccacccaattgcctgtataaagcacttatatagcatacttcccatatgatgtcttttatagccaaactaaaatccaaagacttcaaaagaagagctttctctaaaaacatcttatccttaaagtagtcttgatttaaggagctatgcatctgagtacatctgtctttcctcatatatggataaaaagaaaaaaattggaaaggagaacaaagttctggaagaatctcatgtaatacttgaatatgtaaatgaataaaaacactgttgggctaattcacataataaggacacagggttaagcatgaggagtgggtcttattcatggttctgagcaaaatctcttctagccttgggtttggcattagtgaaatagaaaaaatccaaaagcaaaaaatccccaacttttcattttctctacggtacagaattagaagccaaagaaaagctgggacttaggaggccctgattctaccatggtcccccaaatggcgccttggtttccctgtctacaacagcagaacctcctctcagacatcatcattgaagaggtttttacaatgtgaatgaggcattcacacacactccattccatttatattcagcaaatgactcactagtacagataattattttctaataacagatttcaacggaaagcagggcccattagatcaaaaatggttcccttgcagtgggagaggaaacacctcaagctttactaagtgacgtgaaggaattgttgcagagttgagcaagtacatgcccgttttaaatatttcttacaacaattttgtaaaaatgccaaaatgcattcaactgaatttaaaattcgatgcaactataataaaaatgctgaaaggaattttaatttgtgcatttcggcaaacacaattactatgtttatctgtttcataaaacaacaccgtaagagacaggaagttttgtttaaaaactttttttaagtagtaagaaggcacttatcttcatcagtgaaatcagcattgtgctagcacagaaataggcagacaaatctttagagcaaaatagagttcagaaacagacctgggtatagatgggaattaatacttaataaaggtgacatttcatattagtaggaaaataaatgcatggaaaaatacactaaccatttgaagactaagtttagagtactttctcctgctaaacaccaaaataaatctaagtagattaaagacatttttaaaagcaaaattgtaaaagtgctagtagagctgttaggatggttagaggttcacaagatagatttgccacataatgaaaaacttctgcaacaaacacaaaaaggcaaatgacagattaagaaaaatatttgtaatacttatttagatatgttcatatcctcaatagctcataagttaattggaaaaagaaaaacgccccaagagaaaaataagcaaaggacacaaaaaaagaaaatcaggaataaaaatgaccaagagagatccatatagaaacactcaaactgattcataataaaatgctaattaaaacggtaaaaagatcttattttccactcactaaatagaaaaacttaacagggcggggaaacatataataatctttcttttctaagggaagaattaacctctctggagggtctttggcaatatatataaaagtattttaaaatgtgtacatcccttgacccactaattcaatctctagaaattaatcccaaggaggtagtcacgactgtgccaaaaataataggttcaagggcatttttataataatgaaaaattggaaaataacttaagtgtcccacagtagggtacattatatttagcctatacaatagaaggctatgccaatattaaaactaacgttgtagaataatcacatggaaatatacacctcttcagatgaaaaaaaaacagattacataacacatactaagccccctttaatttttaaaaatacaaatagcaaaactctagaaggatgtgatatatgcccaaaattttagcaatggtatctctggctgatgggattatgaatacccttaaatgtattgctttcacttgtccgtatcttcaaagttttctacaacaaacttgtattacttttaatacatggtaggagaaaccagtaaaggctattacattttaaaaatggaaaatctcgatttctttgggaagaaataatacaatccttagcaatagacataatagtgtttaaaaataattttaactttcctctttcatttaaggctgtactacttataaacaaagttgtctattactctaataccaacccccacctccaaaaaaaaaaaaaaagcaagagatgaataaatcctcacattcctgggaaacacttggtgattgtagtcaacttttgaaagcaaacaccactcctcatatctctgttccccattcttatgacctgggtctgcatcactgaaggattttatgcagcccagcttcatatctgtgactttggtaattttactgctttccttccaccctctctttcattgatcttatggcagaatctcattagttgtgcatcagagcagacactgcaattttcaaaatgtatctatccatgactgaaaggctatcctttaaaaattaacaatggttacctctgcacagacacagagtgtgccatttttctttcctcctttttacctatacgtgcttttcaagttgtctgtaatgagaatactactattttaataggctttttttttcttttctgaagaagtagaaatatatcagaattcaaagaggttattcttatggtgggagtacgctttcttttaaaaattatttttatacattctacattttctgtaataataatttaatattttacaatagagaatgtcttagtatttatttttgaaactataaaacaattgaaccccagagcatggtctaaggctctgaacatgatgtaggaatctatgaggacaagttggcttcctgcctgtatggattctgtcccaaactctgcgtaggcttggtggctattctgctttggaagaagtggtccctatgggtgttacaggcttgttaaatagacaatcttttgggactgcagagagaaccattttaggaaagttgattgcatgtacttccaatcaagaatttctctggacatctatctctctatggatagaggccaaagtaaagaaaagtacgtctggcccagaaatctctgtgaacatggggagttaaggaaaaaccacttttctttgtaggaggattgattggcttgcatagtctcagctggaactcaccgggcacatatcctcctttgcatcaagccagtgcattttttggagctaaggggtctgtcagcatttcattataatcccctattgtcaggggtttagaattcagccataaaaacttgcactgagctggaacttggcacactgctactgccaggaagtgaagtttgtatgtaaaattgaaaaaacatctgtttggccatttttgaagtagtgcgagagcaaaaacagtaaagatgcgggtttctgatactctacgttggctgtcatgcaagtcaaacttgactaagaagcttggctctttcttacttagtgtctctggcaagtatttgctccgtggcatggtccagccacatcagatgcattttaaaaaaaatcatagaattgtgttttcagacacaagcaactgaattgacaaaatgttttcccccgggcttttctttttttgtatttcccagagaagtaaagacttggctggctagaaatacaggtcaggtgctattgtaatgaactccactgggtattcagtatttttggagtaagtgaatttgattgtaatgaatgcactgtttggaatttcattcctaggctgcaactcgttcagaccctccctccaaaagtgaaggtgcaaaccaccacaccagattcaataggtacagggaggaggttttctcccgtctctctttctgtctcccagttgggcaggttgccttcctctttttcctattctgtgtctaccatctcattttaatgggtaatttgaagatttggggtgttattagttttcttgtggcagtgggtttgggtgatcatgaaagaacagtagaaggaagtcgtcactggtgggagtgggaaggatttctctctaccaaatgaattatttaggaagaaatattaagaaattcacacctaactgtgcattttcattcatctttttttcctctcctttcttctccatcctcttcactaccacactacatactgtattataaaattgatcatttttatgtacaaaaacaactattatgattcaacttcattcatacctacatagattatgattgaatgatatgaaattgccacttttgtagatcaaaatggtcaaatagagggaatttcctatggtttagcctaatattacactataaatacattaaatattccttaataatttaaaaacgtggtattctgagtgtgatgatgtgttctagtcccttttttactatttattggctatgaactcttaagtcattcaataactcttcatctcttacaacggataatgataaaaatgattgtatccatgtcacaaggttgttgtgaggctctgactggactctagatgtcaacatgctttgtaagctgtaaagtggaatgtaattgttaattcatcttattgttgtcactgttatatcattgtttacacaatggatctcttgccactgcatcatgtttaggggttgttaaagatgtggtctctttaccacaccagacaccacctccaggaggaagcatgggaaagacctctccaacatctcagtaacagaaatagccacctttcttctgagctactttaaaaaataatgtgtggacataaaatcttataacaaatagtgtttctctctttgctttagcctcttgtaaactcagagcaaagtaaatgactcccttgaatagaccaaatgatattcatgctggccctggcattttctaatttcctgaaccatatttgtttcttttagctcagtttcttgttagactctgttttatattttcatactatctatttgactgcaataattcccccaaacactttttggaacaagaatttccaaaaatttgggggaatttgtttctacctactatggggtagaaacaaatcaagcaatcatttatttctctagactgttatctaattaacttaggccacctgacaagacacaacatagaactcttgtctttgcagtaagaagattttcattgcactagaagaactgacctctactacccttcgctgcttggtgctatatctttatctcaccgtgtagtgtagagtgtatgcattgaactgataatccagaaatagctcataggtgtgtctccccagggaaccaaaagtccaaagactgtgaaaggcagcttctgtgacatgtcaattctgaagctatggtggacgtggctgcatgctgcccttgacatgtccttgctcttggcacaagggaaccacactgggtaaaaagagggcaaggtgcagagaattgcaacaagacccagcatttcgagaacactctactcaatcacttcagcctctccatgtcagcttgtcccctggcctaaaatattccctaggtaggtttgaaaaatgcactctctcaggctcctgggagcattgtgtaacttcccggcatacctcccaaagcaacccaaatggggttttcacaacttcccagagcagggactttgctgctagaccacagattaagatgaagaggttctgtctcaatatatcacatgattgcacacagtcaacttccacctctctggaggtactgaaaggaggggaaaaccaggttgcaaagtcaaaaagcagcatggtgtgatacacaaaataactcaaagtcatcaggactgtgcctaaattattaccctgctctattctagctatgtgatcttgattaagtcagaaaactgcagcaaagccaaacttccttgtctataacatgaagaaaaagttcttatcgaaaagttcttatggagattaaataaaatattacatctgaaagtgcctaagagcacacatattgttaacagaaatggaatcttaattccttgcttccacttacacaggccacacatgctctttctctataaaaacggaattgtttcaatccttttctttccccaaaaggccttgagtaaccacgtgagccaaagtccagctaagggaaaagaacgaaaggcaggaaggatgcttaatcaggaaactaggctgctccccgacaacttaggaagatttacaaatgcaactttctcccaaaaggcccaatagtaaaacccagagacaaaaaagcatggagagccaagtgatggagaggtcacttacttccataaggagagccggtgggtgagccatttagaaatcctggtgaacctggaacacccaagttggccatggggacattgctgtagccattcatactgttgctggaggtactgtaattagactgttgaggcgtggagctggaagagtatccccgcggagagatgctgcttgtgttgcggatgtacccttggcaacaaagaaaaagcccaggtaaatcaacaggcgtgcacagtcaggccacatgtggctagcacaggtcctcattggccccagactgcagaatgtcaccagctgccccgggcagttgtaggaagtgtgcagtccatctttagcttttttttttttttttttttttttttgagatagagtcttactctgtcgctcaggctggagtacagtggcacgatcttggctcactgcaacctctgctgcccgggttcacgtgattcttctgcctcagcctcctgagtagctgggattacaggcaccctgccattgcgcccggctaatttttgtacttttagtggagacgggaattcaccatgttggccaagctgctcttgaactcctgaccccatgatccaccagcctcagcctctcaaagtgctgggattacaggtgtgagccagtgcgcccagcccatcttcagccttttatacctttctctctcttccccatctatgtaaggccatgcccttgatactccattcaaacctgcactcagcacctccagcttacaccaaggagcgaatggctaatagcagtgtggagttccctctcccaaatcatatttcatatgacactggagtccagtgagatatgattggtgtcactgagaaaacattctgtggtcaagttaggctgggcagatgttatgcactgtagccatttcttgattcatatacagaaggcctagagaataaataaactggtttaactttgctagcctagtgtttgccaaatttaacatgccatagcatcttttggcggggcctggaggggaacggtatcttcacctctctggggccacttgtattctatggaacacagttttagaaacgtcagttccaagttgttgccacaccctaggtgcaagtggggatcaatttcattcaaaaagtgtggatgagttcccctaaaatgtgctattctctgacctaggactttggggcatcagcagtgagcatgggggacccagtctatgcctgggacgggggaaggagtgagaaaccacagctcagaaacatcgtatcatatgtcctggaataaaacactttggattactgtctctaaaactatataggaaacaacccaaatttgtcaccaaatgaaaaagaatttgatatttgttctatgggcctcatgtctacagaaacaaaaataataatatgtcctgtctagtctttttttttttttgagacaagatctcactctgttgccctggctggagtacagtggcacagtcatggctcactgcagcttcaacctcctggactcaatctatcctcccacctcaacctcccaaatagcagggactacagatgagcactaccacacctggctaatttttgtattttttgtagacacagggtttcaccatgctgcccaggctggtctcaaactcctgagctcaagcaatctgcccacctcagcctcctgaagtgctgggattacaagcgtgagccaccacacccggctcacctactcttttgtaagaactctccctgggcaaaaaaaaaatgaggaattctcttccaacaaataaaattagaaaaaactatcccattgttaaggacctcattaggaacatttactccttttaaaaatgattcgtgacagatttcgacttagcacttcaataatcaatctcaatgcaaatgtctttacacggtctgcttcacatgtaaaagcacagttgtctttatatttgtttgttgttatatatatgaaataatacaaaatagaagttaccaaataaaaccaagccattcactcttggctaccaggaagagaaatttgggtatcataaatgataatggcaataatcagtttctttccagtattcaatctgataatcacaataacagaagcataaatttcttttaaattaatacctgtaaacctattttctataagcccaaacccttctaaattgataatacccaatccttttttttttttttttgagacaggttctcgctctgttgcccaggctggagtgcactgtcacactgcacaggcagcctcggctcatttgcagtgtgccagcgcaccccactgctcactgcagcctcgacttcccaggctcatgtgatcctcccacctcagcctcccaagtagttgggactacatctgcccaccacacctggctatttttttatagagatgggttttcaccatgttgcccaggctggtctcaaactccagggctcaagcaatctacctgcctcagcctcccaaagtgcagggattacaggtgtgagccaccaaacctggtagtaatactcaatcttccccttaaatatttccagacattctacctggtacctaagaagctcaaactctaataaagtaccatctataatcttgaaataacccaatctatgattgtattgcctatctgtggacacactctgttggaccattatgacccaacctctgactctgtccactccagcagaactttttaaattagacatatttggattttgactctaagaaaggtggtaccttgattatttccttgtgttgactctgagatgctgaccccaagctggctgccataggagttgattcccatcatgccactgtgcgctggggagctagagagggctggaagctggctgggattcctggggacgctgtagagagcttcagcaatgtctgcggctcgcttcaaaatgatgtcctacaaaacaacaggttaatgtgagcattctatccagcataaagtgcaaaactcaataaaggataggatgtcagtatctcacctggttattgtgtggtgtgccataaagagcttccactagatctgcagctcttttcaacagcatctcctggaaaataagcgaggatgggatattgtcaaaggcaaaatccaagatggcaaacaaaagaaaattataggcaaaaatgagaaatccacacatccctcccaaaatgtaagtaattagccaagaggtcctatatttggtttgacaggtagaatacaattgtacatgtacatctctctgtaaatacgtatctatctgaaattcacctctataaaatggctctataaatgattgtgttaccaaaacaaaaaacaacccaattgagagtatagtttattaaaattattaaggtcatggaagttctattaaatgctactttcagcccattctgttttaaaaatctggttctctaattaaccaaatattcttaaaatgattgatggatttgagtttagctgcttgccaaggagttgtccagagtactgaaattatcttggcaacgtctgctgcaaaattttattctaataaagatgaattctttcaataatatttccccctgtacactttaaccacagagaattagtaatcacgaatccctttcctctcattttgccttttccacctcctgttttacacagccttttaaattgctattaacctactttccagatatcatctaatttaatggtggggctagggatttttccaggaggaaaataaaggtgtgatgtagaagcaactctggtgcataaattttattcacagtatgcaaaagagaatatggcattttataatttgtgtgtttaaagtgcaaatataaatgtgaaaatttaatagtttctcatcagctgaatgacaactaataaattgatgtactttttaaagaaagctaacaacatgggccaaattcataaagtaattttcataaggaagttcacttgaaagtgatgtatttcatagaaattttatacagaagcatttttctcctcattagatacctacgtacatagtaggccctcaataattaatactaattgtggattaatgagtccttgcaattatggttaaatagaaacatttaaatacaaaggagtggaagcttatacttttaaccaattatgcagttatttattttcataaagttggccatgttttttaaactgaatactcctgtcgtgtatctgtttaatcagctcaaatgttcatatttcctcagagattaataaataagaccataatatatttcatagcagatattttatgtgcatctcgtatctaaagcttagccaaatttcaaggcctaattaattttaatgggatgtaaatgcctgcatttgtctaagtttcctgaaattctacacaaatggcttcacatgtcaatttccaaagcacattaccttagctaatctctcaggatctccaggatgcctagggatgaccttctgcagtctctggaagccatagtctatggtgggttcatttaatgctgaaagagaaaagtcctctttctgagttggtatcctggctataaagcaaaccttctaattaattcttccacaggtaataagaaggttctggatgcataatggatgtaatcagttagggtttttgctatcgacattggttaattcacatataaatttggaatttatagtacttttatagtttcctattagaataacatttcaaaatttcagattataattatcatttctgctttaagtatacataaacttctctgctatcaaataaaaaattaagcaaccatatctcaatttcttatgaagataataaactacttttatattattttcctttctcttatctctttcttaagtaggactgcactgtctattcttctaaatatctatgaaatattcttctaaatatttttcttaaccagtctcttatgtatatttatacatatataaaccttctatgagcttattctcataaaacccactttatgcataatacgcttccacaattttcaattatatttaattacacccacgtctggtaactatcagccccccaccccacgaatactacaaattttatttcaccactatgttcccgttaagacagggcctggcacatagaaggcacttagtgtcagtaattataaaacgagtgagtgaatgagtgaattaatgaatggcatactttagcatttccactattctaaagagttttctgcatgctgcttttattctttctccttcttccctttcatttattctttaaaagtttcttgtttaaatgtcatggttttaaaattaatacatgattaaagaaaaagatacaaagaatgaaataatcacctgcactgctgttatgcagcaataaacacagtaatgtctatttcctctttaatcttattttttatatatatgttgctattattctatcataacaatgcctcttgtaaaaaactattacaaacattaaatatagaagtaaaaaattaccataaacccacttaagacatgagctggattaacattttttgcatatgtctttccagattgaaacctatacacatacttaaaattattcagagacataccgttcacactgttacataacctacttttcatccacttaacaatatatcataaacttccccaagatcattaactattcttttataacattattttaaattcctgcatatttttctatgacatgttctataatttatttaaatggcttcctaatatcaggcaattaatgtgatcctaatttctcactattataaatatcgagcaataattatcctttgtgcataactttaattatttcaattggaaaattctaagaattggaattactggaccaaaaattatgatttatatttcaggcctttcagacatacggtcaaatcactcctcaggagaatgtatgagtttattctccctccagcaatgcgtgtgctcattttaacttacatttttttactcaccagtgaggttgaagaattttttcttatatttgctgatgttaatttcttcttttataaactgcgtgttaatactttctgcactcttctttcacttgtaaaaatactttatatgttgagatttttaatactgtggtatcatgttgcaatatcacatcccaatttgaccttaagtattttatgtatagaaaaaccacctctattccaagaactggtagatacacacaaacacacacacacacacacacacacaaatgtatatgtacacacctatgtatacatatatgaatgtttattatttaacttatctggattttactttgtaatgtaacattaagaatttacctttgccacaacttaactgtatttcacaatttattgaatggtttctatacatatattctgttttattgatctattctgggtaaaagtcaccctattgaggttgtaatacatatttaatatttgatagggtaagtgtccttccagaaacacacaatcttttaaaactacattttctcaactattttttttttttttttgagacagagtctcactctgtcacccaggctggagtgcagtggtgcaatctcagctcacagcaacctccactgcccgggttcaagcgattctcctgcttcagcctcttgagtagctgggcttacaggcgcgcgccaccatgcctggctaaatttttttttgcatttttagtagaggcagggtttcaccatgttgatcaggttggtcccgaactcctgacctcgtgatccgcctgcctcggcctcacaaagtgctgggattacaggtgtgagccaccgcacccggccttctcaattattcttatccatttattctttccagtttaaccttagggaaatttcaaaaaaaatttcagttgcattaaacctacagctagagagaaaatggatggctttgcaatagcaacactccaccttcttctttagatccctcagtaaactgtgctgctcatcatataggtgctaaattttttgtttaccattttaattttttggtatttcactttttgtttttactgtgaatatggctattcattaatcatattgtccaagagttttattagagtctagaaacacttctgtgttttacacatctgtgcaggaagtctatggcatacagatgaagacaatcagctttagagttgagtagatctagggtctgaattccagctccacaatgtatgtgaacgtgagctgtttaaaatccattttataggttggctgtcaaaatcaaaactatttctataatgtcctcagcacggtgcttggcatataaaatatctttttcttttttcttttgagacagggtttcaccctgttgcccaggctggtctcaaactcctaggctcaagcaatcgtccgccttggcctcccagagtgctgggattacagacctgagccactgcacctggcctataaaagatcttaaccaggccaggcgcagtgactcatgcctgtaatcccagcactttgggaggctgaggcgggcagatcatgaggtcaggagatcgagactatcctggctaacacggtgaaaccccatctctactgaaaatacaaaaaattagccgggcgtggtggcgggtgcctgtagtcccagctactcgggaggctgaggcaggagaatggcgtgaacccaggaggtggagcttgcagtgagccaagatcacgccgctgcaccccagcctgggtgacagagcaagactccgtctcaaaaaaaaaaaaatcttaactgaaagtaactgttattttgtagccaaaacccctgacagatatcattattttttttctattacttaggcctgtacattcatatcatctacttacagtgatcattttgtctccttttgatagatgcattaatcccatttagttctcttaatcctattcttgtattggctaaaacttcccaaacaatgccccaaaatgacaataaagttggatattcttgtttttctctgaatgggaatgacatattataccaccaaatatggtgttggctatttgagatagatattatttatcatggttcaataagggttcaataagggttatcaggacttcttggagttttagaaaatcacagtcacatgaattttctcttttggccagattttttatttatatatataatatatatatatatataatatataggatatataatataaaaatatataatatatataatatataggacatatataatataaaaatatataatatatattatatgtaatttttatgtattatataatttatatatataataatttttatataatataatataatgtttatattatattatatatatatatatattttttttttttttgagacaaagtcttgctgtgtcaccccggctggagtgcaatggcatgatcttggctcactgcaacctctgcctcccaggttcaagcgattctcctgtctcagcctccctagtagctggaattacaggcatgcaccaccatgcctggctaatttttgtatttttagtagagatggggtttcaccatattggccacgctggtcacgaactcctgacctcaagtgatccacccatctcggcctcccaaagcgctgggattacagacatgagctaccgcgcctggcctatattttatattttctaatatttcaaaattaaacattaattcatggaagtaatgtatcattttcttggtatatatctaaattcagatataaccattaataccagattcaaccattaataccagattaacatttccttaacacaactggcacaaggattaaatcaagttactaagaacagtgcctggcacttggtgagcacgcaggtatcagttattgttattgctgtcaggaatttatgtgtccatattaataactaggattgtgtgcatggctctgtccaactaatgatttttatttcatatgagctttgaaaactatattgagaagttttctttattttatcctatgctctataaatcttacatagcatggacagtagctcttgctaaacacttgaaagaaccctagttaacattgctcacactaaggtcaccaatagcattttagccaagccaacaggaacttttccattcttaaccccgagttaacatttgagaccgctcatattctccacttctagaaaccctcccacccactggcttcctgaacttacactgcccggcttccttcctacctctttggccatgtcagactactttgcggactgttctttctctgcctgtcttgtaaatgatgctcctcaagatggttgccaggcagtcctcagctttgctgtacgttcccctgggcaacttcatcaattctccatgatttccacatgcagctacatgctaatcgtcataaatcttgatctctagactagatacctggcctgagattcagctttaaatatccaactgttggctagaaaattccacttagatggtccatagattccccctacccaagatacccaagctcatgagattttctgtgaattgtaccatcatccaaatgattgactgccaatcagaaaccttgaattcattgtttctcaatatcattgtattttttctagaaaaaatcatccatttcatcaagattgttaatgttttagcatagaatctatattgtatttgtttaaaatttctaaccgatctagagttcccctccccctctgcccactgaaatgtacacaaatatatgtagacatttaaattatttaacctatctggattttatttcgttgtgtaacattaagtacttatctttgccacaacttactgtatttcacaattttgttgtaattttctgattagtcctatttataattttgacttcctttagctccaggaagagtatcttaaaatttctaggtaattgagtactaaactgttaattgcttattgtagccaactgccctggattttaaaaggtgtcctgcacagtatgtgccttttggaatttattgcatttttgtgaattaatacatattagttttgtctgcattttatgggcaatgctttaatgtcttatttcatctatctttttgatcactttaacacatccatttttgcttctataaatttgtcttcccacattctcatttctaatagttttaaatatatatacttttctagtgatttgagagatatacacactttttgttgttgttgttgagacagggacacaaagtctggttctgccacccaggctggagtgcagtgcacgatcacagctcactgcaacctccacctcctgggctcaagcaatcctcctgcctcagcctcctgactaacttgggctacagacatgcaccacatgcctaatttttgtatttttggtagagatgggttttcaccatcttgcccaggctgatcttgaactcctgagctcaagcaatccgcccgccttagcctcccaaattgctgggactataggcatgagtcacagctcctggtctgtacatactattttaatttacagaagtgtctttagacttctctgaaaatattttatttttcctaattatttgaggtgttgagtcgctccatatataaggaattttgcttgccttctatcttcccacctctttctctccacttatacatttttgttggcagtttatcatttcaagctgatttactattcttagattttctatgttctatatttttagaaactaattttcatgtttccactaagtctcatcaccatattaacaagaattttttagacactctatatttaactgctttctcggccaaccaccaatcctgcaatagcacaacttttcccatcttgcattcttcattgattcaattctcctgcagtcaggtgctatcaataagaataagagttaaattctgtctgggccactgaaataagagagtatctttttgtctttctcacacataaatgacaactgctctggatatagaatagttaagtacactctcccattcaagatcaactttctgcttgtgccactggttctcactcctcaagttggagacaggggagcctcagggtggttgttggtgtctcccccatcacttccttgccctgctgctctttcctaagggggaatgaggaggccagctggaattcgcatgtccaccagtacgaccctgtgtgcacatgccagcacaatgatgcaaaatttctgggatactaatgactttagcctagcttcaagcattattaccagatttcctttatttttatgttttcctgaaagtatcctctaatatattttgggggtgggggccgattaaacacttgcactcacaaggccatcttacctagaaacacatgtaagaatagccgtatgtttaagtagaattattctgtaaacttttttcttccacttagctttataatgtcagcaatttgggaagactttttcttaaataatgtgatttttagtggtggtaatatgcaatagtgaaaatcattattaccaccattaggacgtactgaagccttactatgttaagggcactctgctaagccttttaggcacattagctcgttcgattctgattgtaaccctacaatgtgggttttatccccattttcaatgcagtcccaagtggtaaaggtgggatctgtgtcctgcttctctaactccaaagcctgtgctcttaacctttcctgctgcagaaccagagatgatgatccttccatccccctctgggcatcctcctcagcttcaagagctacagatgcaagagcatgatgggcatcctcctcagcttcaagagctacagatgcaaaagcatgaatgaagtcctgcctgtgttgcctgactttgtcactgagaccagaaggagaccccatgcggaatcaactagcaaacacaaacagctgcctggtgctgcagggcaaacagacttgatgatgaaattctcaaaattcatcattgcctaattttttttttttttagaaatatgcaccattttgttagccaaagtgcagattttcgtagagaaaacaggaaaattattgatatgggtacactcacaacgtgctaaatacaaactaaacagataacccataaggcagaaaatataacccctccccgactccatttctgcctttgtccctttccatctgcatggctgtcccccaccctggcaagtgctctgcctctcccaagagcatttttgggggtccagccaggtagcaccaccttccttatcccttagtccttcctgctgctcagagaggaattttctggagctgggctctaatcagtgcacagaggtgggatggagatgagtttttttaaaatataatttatcacgcatttgcacccattgttctcccaaccagattgcaaaccactaggatacagggtcatgtctagtttctcttgcctgccctcccctccccagctcccaaattagacatggcagagtatctttactacactgggctggcaattcatgttttacactgaataagtagataaggcagaattgtctatttttatgttgttttttggcaggtccctgccagacttcataggcataaactatgggatacatctcgtgtgcatccaagtgagagagaggacagtaaaacacagttacctacacagacagggaaaatcacactcacacatacacaccgacagaatttcatttaatcaagtgcacattggaagtagaaagcatgaagctgaaagtactccagctctgtttagccaacactaaaccataagagggacctcagcctttaacacatggccgggtttgacaactctttggttccagactgacttcccaactgaccagttgcttttgcgtctcttagattcagcttcaccttgaatcccaacttcctccctccccctccctacttccctgggcgttctctggcttttcagtcctggtatgagccaagcaaagctcaattagctaatgaggtgcccaagaccagcaccaagactgtctccaagggccaaccaggccattaactgccatcatcagtgttaatttacaaccttgcctaccacatggagtgcggggatgctgtgaagttctgccaaccttttggctgacagggatacagagaagtgctggcaaggcaaaaacagagtaaattaaaaatatgcttcaatctataggctctatttatctatgtctttctttagtaatataacattaaggtaaaaggtcatagccccactgaaatataatttatatttaccttttattaaataattatggcatggcatgaagttaaatattacagaagctaatcaagagggaattcaagagagaaaactcagacatgagaatttcgtctttgctatacatagaatgtcttaatcctccactgggagtcattcgggtttgcttaaggagtttaataatacacatttcaactgccacagaatctaaatcccatttggatcagccttgaaaaactttcatcaataccttgagatttcataatatttctcttgagagcctggatctcatgtgccatttctcattttgattgcgggtataatatatgagattacttacatatatcttggacccaataaataaatataaactataagcaatatgtgaatggtttcttttttaaagtaaatagtatttaactaaaaatatctactgggaaccactctttaaaaaaaaaaaagctggctggtgctcaatattaattttcccaaaggattagtgcgatataaaattctatatggttttaattttctttccttaagaggaggcacagggagcagataatgcttaccccatcttatacttctacttctgtttcacaaaaatgaaggggacactggctaacatggaaagggggctctttgttagaaccctgttcagcccttaacaattacagccttgacactgcaggctggaggtcatttatgctcttgaccagcaggagcactgattgcaaagatggcaacatcaaggcctggttgctttttttaaaaaaaatgtgagagaagatgatgatgagtgaggcaagatctgagttctcaattggctgccactctggggatgttggcggatcacactgctggcctcggttgcagctttactcaccagtgagtcttcccttggatcctaggattaccatggaatctgtaaatggtcatcaggaggccaataaaagtagaaattctaagcctagccatgtgtttgtgcatctgtgcattatctgcagaaagggagcttcacttcatcagatgtgcacacagcccatggtctcctaagggtgacagcccacagaactagaggatcactacagtcctaactctaaattccaactttcttcaagaataaggaaaaccactgaaaggttttctttgcattgtaagaaagcaaacaacaacaacaacaacaacaacaacaacaacaaacccttaaatctatataatgtgactgccatataaacacaagaccagaagacagacactgactggcaatggaagagaaaacatgctttaacaatacctgccacgtggctttggccaaggagaattactctctgttgacagcgtaggaaggcatgaaacacaatctggctttgggaggaatttagataacacagacgagctcctgccctcgtgccactttaggacgtctctgtcctctttccttacatagtactttcttcccacatgttcattcccacaaagtctgtcttccatgtgctaggatttgggttcccttctctctccctcgtccttccccttccaatttccttgtctatttgtctcccttctgccctattcctcatgtgtccaacatgcaaaggctacgttaaattcacacttaaatgctaagtttttcattgcatatgatggtgtgatgggataaagctggtcctagcttgggagctgccttagttcccaacactaacaaatgacacaaccttcatcaggtcacttggccaggtgaggctttggtttatttctctgtgaagacaaaggattggggtaaatggcttctaagacccctttcaagctcttacattttatgattctaaggctatcactgatttggagcagtggctttcttctctgaggagtagagggtggagctgaagtcaaggctgttgaattaagttgtctttaaccttggctacattgaaatctctccccacatccatttgttttaatgtagcaaaagttcagtgtcaccaatttaaaaacaaaaaggaacaaagataatataggaacacattattaagaggcggtacctgcctttgtggacacaggaacaagaatacgaggagagaaccaacagtgcacaagtgaaagattagactgaagcctctgatatttaattttaaatgaaatattaatttaatatttaattacactttggtttccagaaaaactgcagcagcaagacagattgtttgaagaagggaataatatacatggttaaggagacaactgtaaaaattaaagataaatttcaagggtaaatctaaatgccacaatggagcagttataaatacactcttgctctctgtaatgtgtatttagaatattatagccgagtgtgccaatccattaaggggctgggatgtctctagtgaaacagcagccccctattctggggctaacaacggagacatcatttctcagactcagctgaatgatgtatctgaatttcacaagaggtgggagtggagacaacttcagtaaaagtgcaggctaccaggggggctattgactcaacctgtctccagtttgaacaaggaatagttgtacttgggccagtttctgatgtctgaattgggtatttttaactaaaaatcagattcatttcttcaatgggaatttttttttccaggataacgctatatggggaaaaaaaatgcgaagtggatgagctattaacatttgaaatccagtttgcacatctgtgcagcacagctttatgaaggcaggccccacaattcacacacagccttggggaggaggctgttcagggtatgatttgggggtgtgtggaaaaacctcggcctctgatttttcctcccagctgctgcctgttcttgccttaatcctgtcgatgaatactttctcccaaataatgaacagaaaaaaaaaattgtttttttgccaaagtagaagataagaagtattctgggagagggggttagttagcatgaattatctggtttcttggtgcatctcaactagcaggttgtctatgtagacctctaagttctcttgcacaccttgtcaagcacctactctgcatgtacctgggccagctgggacacagtcaatctcttctgctcctttggtccaccttttattttttatttatttatttttttcttacaagaacttctgggttcttttaaaaaattatttatttatttatttaagaaacaaggtttccctctgtcgcccaggctggagtacagtagtgcaatcatagctcactgcagcctcgatctcctgggctcaagcgtttctcccaccttgggctcccaagagctgggactacaagcccatgccccaccagcctggctaactttttttttttttttttttttttggagatgggatcttgcctgggttggtctcaaactcctggcctcaagtgatcctctggcctcagcctcccaaagtactggaatttcaggggggaaccatggtgcctggcttctaccttttaatacctgcttccttgtgaccccctgtccctctcctgcaaaggccatgttcttgggctcccttggccttctctgtctcctgcaaaaacctgatttctaatctagatcgagatattcagggcatgatgtggtaggtctttcaagatgaatccacattttccagaagacagacaaagaagccctgtgctggtccaacagcaaagagggaggacgctccccagagctgcatgtatcctcccaccagatgcttacaacagtgaattgtgcttgtgcttttatatttatatacataaatacctttgcatatgtatgtaattttatctttctaatggggtaagtatatcctcatttttaggttagaaaaatggcacaaagaaaagttgcttttcctgaaagttggaatgcaaatccctgcctcttcactctgtcatcagctctcttctatacaacagactgccccagcgccaggttctctcaagcttaataaaaatgtggagttcatatttctttgcctcctgcaacttcagttatttgtagagaggataatttctatgatttctaaagaattcaaggaacttcacaggctctgagtgtagcacatcatactgactggagcctccccttcataactcctgctttttgagtcttctagaaagttccacctaagagcaagcattactattgtgttcacagtgaaaggacccagtctcataagaaccttcccaagggtagagtgctttataagccaaaaagtctctgcaacagcctcataagcagaacttaggcctcacaaactcatttctttgtttaaaatatacattccctaaattagttcaaccactgtggaagacagtgtggtgattcttcaaggatctagaaccagaactgccatttgacttaggaattccatgactaggtatatacccaaaggaatataaatcattctattataaagatacatgcacgcgtatgtttgttgaagcatgttcacaaaagcaaagacttggaaccaacccaaatacccatcaatgatagactggataataaaaatgtggtatatatacactgtggaatactatgcagccataaaaaggaatgagagcatgtcatatttgcagggacatggatgaagctggaagccattatgctcagcgaactaacatgggaacacaaaaccaaacaccgcatgttctcactcataagtgggagctgaacaatgagaacacatggacacagggaggggaacaacacacactgtcggtgggttgggggcagggagaggaagagcatcaggacaaatagctaatgcatgcagggcttaatagctaggtgatgggtcgatctgtgctgcaaaccatcatggcacatgtatacctatgtaacaaatctgcacgtcctgcacgtgtatcccagaacttaaagtaaaataaaacttaaaatataaaaataaaaaataaaataaaatacacattctcagaccctctcaggagagtagcaagaaatattcccatattgcaatctgaaaaccagggcccaggtaaggcgtcttctgagacccccttcatgctcaccagccacggcctatttcctgtgcacctctccagagtaacagcccaagagccaaggcatcatctgccaagtaaaacaagacaagaccaaacagatggccttggtatcgtgttttgtaataaactgtacagtactgggaagtagtacaggttaggtgttaagagcagaactttggaataagacatctaggattcatcataccttggtgaccttaggcaagtgacttaatttctctaagtagcaggatctcagctatgaagttgagatcctcatagaactgtcatcacagataaaggtggtgatactcggagcctgtaggacagagccttgccttacgtgcttaatagatgacagatgtgattactgaactgctgtcatttttgcttgttattctgtcttatgatagaacttataaaagacttcttaaccagctgtctaatgtgtagtccaggttctgcaaagaaccacaggaacaatagtgaaaagctgtgctcatttacccccatgtcctcacacactgtgttttgccctggattctgtggttggtgcagattttacaattagagacaatgacaattccacccctaaataccatgctctgatatcctctccctgcatactcactgccacctgaagtcaagacagccaagaagtccctgaacaaccagtcactgtggttctgttgggtgcccctactaggattatttttctgcattgccagttctctctggaagtctgcgcggaagacagaggatctcttctcctctcctctccgcctaggctagcatacctcctccaggtctcaaaccagtaagaggcaactggactttccctaatgagccctgttctcacgtggctctctcaattgcgcagaagcaagttgcacgttagcaaaccacggttggtggaaaattgacctgcaaagtcacatgtgcaaagaaaatgtgttatttttcagagccccgatgttgtttgtgctgtggttggcagtggcaaccatgggggtctggctaattaaccaggtacacctaataatgggcttggctctgtcatggtggtgcatccttggatacagaaaatgtcaacagttggactatggaccacagagtgtgtgcagtgggacaggggtggaaggaggaaaggttctctggagtctcccgcaggactctccttctagaaagttctacataagagtaaacactactattgtgttcctggtgaacggacccagtctcgtaagaaccctcccacgggtggagtgctttataggccagaaagcctctccaacagcctcaggagcagaactcaggtttctcaaactcatttctttgtttaaaatacagattcccagaccctgtccgaagagcatgatttggcattgtctggaatggtgccaagcataattcttatgatcagccaaattagggaaacacctttgggtaacagcataattggcaccagagctttacagatgatggaaatgaggctcagagaggtcagtgaccggatgaaagtacacacaagcagtggaccacacggccagcccccaaaggcagtgcttccggctggtcctcctctcgggacccgtcctgctcacagcactcactctgcaccttttaaaaccctctaggtttcaagttttgccttttcctccagaaccagaatgactttttgtccaccttgccattggaggtgagtggtttgtctaggcctatagcagcctaggagcactgtcctgcagtgaagcactccaggcgtccagagtgcgtgggtcagtgcttcagggtggctggaaagacaggagggctttgtctttctcctcctagggaagaggccatggctctccaggtgaccagagtgaggactcagctctgaggtggaacagcccatcagcaggtgcctgtggaagccactgatagtggatgaagacgaaattggcttttcatgtcagtagctgccaattcaatgggaaagacaggaggccaccaacctatttcctgtgggctctagaaccctccatggatgacatcagcttcctgtctccaccaacccaagtggtacttcgctcagtaacctcggggtggaagtttttctagaaagtggccagactcctgagccatccttgatagcatttgtaattttggatgatgctatccttgatagcatttcttctttatttgtgaatgaacaaggatgatccagccatccttgatagcatttcttctttatttgtgaatgaacaaactcctgagtccctcccctcctcactccgactgcccccgaaggcccttccttctcaaaggcagtttctggaagaagcaccaccaactatcaggctggaaatactttgtacctgaaaaatcaagtttactaatgtgcactgtttcagtatttaaacgtgtgatgctatattgtgccatactttattctttaaattttaaattttaaattatttaattttattagatacaagtaagcaacatgaaaaaaatttaaataacaacaacactgagaaaccaccattgttaataccttggcatgcaggattctgtaccctactagggttgtttgtaaaactactcatttttcatatatctaaacattgggtcatatcatgcagactattttaaagctcctttaaaacccatatcacagatgcctttcatgtaaataaatatccatccatggcattatttttaatgtctctaaaaaagtgtagaagatgttccattatttgtttaatgaatcccctaatgtacaatgaggatattttcaatttttcactataataaactcccatgaacggtcttccagcaaactcaattatttcctaggcagacatttctagaagtagaattgctgggtcaaagggcacatacatcttcaggtgttctcttatcaaatttacattcctgcagtagtatcttagatagttatgacacctacccatctccttatagctccatcacccatgtccaggggtgtctttgaaacactagagataccagaagctctacatgcagaaagtgtcctggaaaaagacccactctccaactgacttcagggacagcccactctcctggtttcctcctaccctgaccactccttctcagactccttcccaggttccttctgtcaactttaatcctgcatgctggtgttcccaaggtgccatatctccactctttcatggcgatctcatctggtcctatggctttaaatcctgtctagagtatcctgcagtagtatcttagaaagtctccattgtctttgaatcttgccaacctgagtattttcatttgtttaaaagaaaatctctgtcaacttgatagggaaaaaaaggtgatcttgttgccttaatttgcatttatttattagtgcagttgggactttttattataataggtttctttgtttactagtcttccttcctgaatttaactcttgatgttcattgctagctttctatttggatatttgtcttttcctcttcaatttctaagatacctaacgttctcctctttttccacaatgtataacatagcagttaacaaacagtaggcacaaaataaatttttgctgaataaaggaataagtctttttatacttaagataataggccacgtagagcaaatatgtggtctcagtttgtccttttccctttaatgcctggcatattgacacacaaacattttccttttacgtaatcacatcttttgcttgatggtgcctgtctttggcctcaatgttcacaagtctcaaaatgataattattctttaaacctgtaatcttctgaaatgtctacatttttaataaaaatatttaatttgaatacagtttagtttatatgctatgaaatttaaaatctaactttttcttttaatgcctaactagttggcccaacacatttgttaagcattccatcttttctgcgttgacctgacctggcttccctcacctactaatacctaagtatttatacccttaatgtgtgcaaagtgtttgttttttaaatgttctcttctgttgcatgacatttctatatgttcctacaaagccccatattcttttaattattgaaacttaaaataggttttaatgtctggcagggcaagggcctctcatttttcaaaatcctcttttagcacctttccttcccaggtgaacttttgtaaagttttcccaaacattttgttgctattttgattggcactgtgttaaatgtattcattaatcgacatctttacaatattaaatcttcccacctctccaccagctggaagtattttgtccttcctctgaactcccttagcacgttatatcttaaaaaaaaatcactttctaaactatacccacccaatttttcaactctgaaacatgagtgtcgtcccctccttcccctccccaaccttcaccccatccaatcaatcatcaagttgtgtcaatgttacctcctaaattttatccacttctgcctgtccccaccaccagcactctgctccaagctaccatcatttctggcctgggccaccccactggcctccaagtgacctccctgcatccaacctggcttccaagccatcctctgcattgtagccagaatgatcttttaaaaggcaaatctgatggtggcaatattcccaaagcttcccatggcgcttgaggaagagctgaaaaaaaacaagccttaatgtgacctggcccctgcccacctttgcagcttgaacacagcctctcttaaactcattccttctgctctgttcataaaatatatcccatgttcttgtctaccccagggtctttgcacatactgttttgtctattctaaatcctccccatcaactcagtttaaggaggttcaattcccctggcatatgttcccagcatcctaaacaactccttttagtcctcatcaggtttgcaattccttgtttaagtcagtctccatactgataaggctaatggtaatgacacagaagtgctgggaagggaagggcgtggtacctttaaatgatatggaagtggggaagggaagtgctgggtagaggaaggcctggtccctggctagggctccaccccttggcctgtgcccatggacctaagttaggacaggcatttttgtttacctgcccaaatgttgcatttcccaagaccaccctggcctgtcatgcccccatcctgtgcctataaaaaccccgagaccctggaaggcagacacacatcagcggaggaacacctgggtggctggacatccagaggaacgcaccgacaggcaccggcgggccactgaccggcagaacgacacagaatgtggctggggcagttggaggagaacctgggctgccgagaggcccggggaaaaccatctcccttctggctcccttatctgctgagaactacctcctctcgataaaaccttgcactcattctccaagcccaggtgtgatccaattcttctggtacaccaaagcaagaaccctggaatatgaaagccctctgtccttgtgataaggcaggggtctaattgagctgagtaacacaagccgcctacggaaggctaaactaaaagagcacctgtaacacacacccactggggcttcagctgtaaaatttacccctagacactgctatggggtcagagccccacagcctgcccgtctgcatgctcccctagaggtctgaacagtgaggcactgaagaagcgagccacagccccgtcgcatgccctgcgaggggaacaaggggacttttcccatttcagtaataataagaataatataaataataaaccactttttgactaataagatatgggccattctatccactctctatcccaggtgctttccatgaagagacctggctgtaccagcttgtgaaggcaggtggtgaagttttcaggaacgttgtgagctacttgagtggtagcttgaaatctgccatggtgagagtatttgaccgtggaaatcagtaaatggtataaacccatgatttaaaaaagaaaatctgcttcttcctgaagagccagttgttaaacctttgccagcccaccacagttgccaggcactgtatcatttagtcctcagctctgtaggtagcccattttatagatgggggaaaaggaggttaagtcacttccccaagattcaagaacaattcagaaggcaagccacactatgagtccaggtatctaattccagagcatgagcagttagtgtttatgtcagtgcattgtaatgtcaggaaggtgggagacactggtttgacttgtctccaatagcctgagcatagagctcaatgttgagcacagagtgcactgctcaataaatacacacgtcatgcaaaagtcgttaatgtctcagcacatgaagaaaacagagatattttacgacttgctaaaggagcatcagaaagacaccaggcaggatggccagaggcctgcatctttgttctaatgccatctttaattcaacaggcaattactagcaaatcacttctgcttaggtttcagttttctcttctggaaaaggaggactttgactagttaatcttcatattcccttaatctctaaaattatttgaatttacatgtaacataacatctgttattttcacaggtgtataggctccccttttgctaggtactgtgtttccaagatctgtcaaccacagcctcctcattctgtctggcaaattcctatttcgcttcaaaaatgtcagctattgctacctcctctgggaagccttccctgattccccaaagctagtcactccctgcatagtgcccctataacccttttttattttaggggctgaatctagttattgtaatgtaactgtagccatctcccttttttttttttttaacttctgtcatctcccattctagaactgtaagctgatagaggtgtactgatattattgattttgtgtgtttagagcacgtgtttgttgagtaaataaatgggtgacacttctaccttcagaaatccatatctaattggtctggggtttgacctaggcactgataatttaaagtgtggccaagggtgaggacctcttttacacatgcacacacacgtacacaacacctggttccaaatgtctacatcaattgcgctactgattgagattgttctttacttcaatagagagttcaggattggctgcaatgtgtttgttatgatacctactcatctccttataggccagctccatcacccacatccaggggtgtctttgaaacaacagagataccagaagctctacatgtaaacagtgtcctggaacaagacccgctatccaactgacctcagggacagcacacgcttctggcttcttcttaccctgaccactccttctcaggatccttcccaggttcctcctgtcatctttaatcctgcatgctggtgttcccaaggcaccatatttggacttctccaccatatcatggtgatctcctctggtcctgtggctttaaatcctgtctagatgctggttgctcctctgctcaacatcttccacgtcttcccatccaaagtccttgccctgcctgactttccaacctcatctcccatcactctcttccccactgactccactccagccatactggcattcttgctcttccccaacagcaccaggctccctcccacttgtaatcttgctgtaccctctacctgggacaaccacctcccccacccccagattcatggactgccaggcactgctccagtgaacaccagtgaaccaaacagaaaacccagcccaagggagctcctgcgatggaggagggaatgtggatggagaggagaggaggatggagaaagaaggagagaagaggggatggatctccacagctggcgccatcctgggattcaggtcttcgctccatgtcccctcttcagagaggcctccctaaccagcctgcccaaccctccctcactctccttcccttacttctcactatctgaaattatatcacttattttctctcttgtctgtcttcccctctataatacaagctttatgaagttgggggactttaccttcctcccttctatacccgtgagcttagagctgtgccagcccatggcaggcaggtcataaatactagtttgaatgaatgaatgaactatatccctttggagctggaacagtaacttttttattgtgactgcaatagaatctcccatagaaccacagaaaataacacctgagatgtgcttatctcaggacagaaaattcaaaggctaaattttgaataaatagacccaaaaattacctctttccatctactgctaattgatagctagccagacattgacactttaacaagagtaggaatcagagcgcaaatgagagactacactatctataaaataatattattaaaaatttataatatgcctgctatattttcttggtttatatatttctttctctatactctttattttctctgtcaaagtataatacctcattgatcttcctgcttctggttgttcctcagttaactcagtctttatattaacaccatttctttttttgaagacaatacctttgagttactcttcgttgcacagaaaccctcaatgccttcttattttctgacaagtcaagtctaaactcccttaccaggctccttttttttttaactttaaaaaaatgtggtaaaatactcataacatacaatttaccatcttaatcatttttaagtgtgcagctcatttgggctaagtagttcacattgttgtacaaccatcatcaccatccatatccagaactctttttgtcttgcaaaactgaatctctggacccattaaatgaatccccaatttctcctcccttaacccttggtacccaccattagactttccatctctatgaatttgactactgtatgtactacataaggtttttaagctgttttatgctttctttccctcccatgctgatatggtttggctgtgtccccacccaaatctcatcttgaattgtagctcccataattcccatgtgttgtgggagggacctggtgggagatagttgaatcatgagggcagtttctcctatactgttctcatggtagtgagtaagtctcacgagatctgatgattttatagtgggttccccttcacttggttctcattctctcgtctgtcaccatgtaagatgtgcctttcgccttctgccatgaatatgaggcctccccagccacttggaactatgagtccattgaaactctttttctttaaaaattacccagtctcgggtatgtctttatcagcagcatgaaaacggactaatacacatgcctagcacatgtagggtaagttctagtttaaatacaaaatgcattgccacagctgtcagacaagcttttggtcctgcaggaatgtgctcacctcaccctgtggcctttgcctatgggattcccatagtgagaacattctccctttctctctttgcccatccaaattttccctgtccgtaaatatggtcttcaatttccatctcttccttggcacctcaccccattactcttgtccacactaagccctctcttcctgaaactcatattccattcatcggaattaccaaacatttcaaatttatgaattcaccagttgttctttgcaatataccgttgtctccttcaaaagtttctaaacttccaagtggggaagggatcatgtcttacgtgtcatccatacccttctcttagaaaaagcagttgatacaaagtagaaatttaacaaatattgactaatatatgatgtttaccttcttgaagttttaaaatactttgaattgctctccaacatcactaggcaactctcttgaatcttttcaagaaaatgtagttacagccaataactgtctattttttaatctgaccatgtggataaaagatggttacagcatggttccaacagagttaaattttcagagatgtgttcctgaaatgagctgctgtgatctcccagatcatgcagaagttgcttaagtaaaacactaattgagaagtgaaccttcacatcaccattcaacatctatcactcagctcactctttccacactagtaaaaagacctagaaaaatcaggacgattacaaagtgcagatactgggaactagcgcaaaggcaaaccagaagccagcctctcttggaatcgttttctcacctacctgtgtaaatgaaccttcctggggctcctttgcagaactgtttagatttataagataatgtcacctctaccacgcctgggatgtgccggggaggagtctgtactctgatggcatgaggggttattagctgaggaatgaacaggcagggaaataaaatacccattagacaagccatcaccaaggacataaggtgtacaacatctcccactattgctccccaggggcttctttctctctgctctactctaactggagtactcctagctccaaatgcactctgaacatccctgtcctgtctctgtctgtctctgtgtatctgtctgtctctgtctgtctgtccctctctctgtgtgtatgtctctgtctctctctctctctctctgtctgtctctctctctctgacccccaccttggaatttcctctcaactcaaccaatgtaggtcctttatttcctacaagcccaggccaagtccctcccacctcctgctgccaaccccaccctcacccctggaatcctttcctctgctgaactcctatcctgcttgtgatttcaaatattgatctggcaagtgccaaccccaacttaacactgtcacttatctttttgtcatgttttatatgatgatgaaagtcaaacacatccaatttagaacattttgaaattacagaaaaatattttttaaaaattaacatcataaagacaatcaatattaacatctggtatgtttccagtacctttgtataaatgtgtgttatataactagattttacatccataggcagtgttgtccttgttttttttctgcttagtattacagtgtgagcatatcctttttcctgtatcattcgaattttttcaaaacattttttaacggtggagtgacattccatcactttacaattctagatttctaagttttcaccattttaaataatactgcagtggatacttatcttcttaagaaacccatgcctgatttactatgacttttatgcttttttacccttggtgtttgtgctagtttcccagatcaaaacaatctttgggcaaaaggaaatcagagtaagcctgttgcctctgcttacctcgctccatacaagcatagtcccaaacaccacttggagaccatcaaagaagttgtccccgatgatgatgaccatggctcctcctgtggtccagccttcactcgggctaatggctttgatgcagggggtagctaagaagacaggaaagaaaaagtcaggtttgttctttcatgggtgtccaactttttggcttcccaggcccacattggaagaagaattgtcttgggccacgtataaaatacactaatgctaacgataactgatgagctaacaaacaacaaacaaaaaaggtccatgtataatttttgtgatatcccccaccacagataagaaaacaaatccttgccttcaaaggattggacacaccacaaataaaaagtccttgcattcaaagggctggacacccgtatttggttgaagcctagaattctgcggatgggctgcttttgaaagctgctggtcattccaagaagttcaagctgagatttgttgacttgccatcattccctaactggctgttggttttcaccgagtcattaaagcctaatgagttgaccattatgtatgaaaaagtaaaacacttaggtaattgtgcaaagggtgtttgaaaaactctgttgtttttgcccatatttttataagttgatcacactggaaatgtgtaaatcccctttctctccccacctcctctgccctaagatgttaagatttacaaggcctgttaatgggccagagagagagagggggagaaagcaaaatctatcatagttgaaggcttttttcagctctatcaagagacaatttctaatcactctactaactttgtaggaaggattttccccacttcttccatatgctccaggcctctggactttatatcccaacaggaacccaatatggttttcaggccataactaaagtcaatccatcactccatttccaaagttgacagggtcaaaggtagaggagaactttggcaggactccaaaaacatgagccccctttgaacagccagtcaatcacatccaatcagtcaaaagaaactggatgggttcctagtcctgaactctgggattttcttctcccctttcagtgcccactgtgggagaattaacaccactccaaattctttactgattcaatcattttctttcagttcattaattcctgtttacaatgatacaagatacattttcagggctgagttagggtgggaggtgggggttgggtggtagtatataacaaaacatcacactaaaatagtagcctagtttgaccaacattctgtattataaggtctttctataccagtgagttggggagtgcagacagaaggggaataattaaaatggaatttacttagatttgtcagttatcttcatcgatatactttaattttttggacaacttgaaatttaacagttaccggtatttctaattactttaatgcacttggaaaactacccagaacagaccatgatttcttcttgtccaagcaaacaaaaatcaattagtgtcagtttcattctgagcattgttttgttttgcctacaatctgtttaagggcacatgtgacacttattcatacatgtctggcactgcaatgttcctgtttaactaagatgtcataggcctatgtttgcctgaaatgcccgtctcacaaaaaggaaaacacagaacaggatggaagagagtgggaggcatgaggacttggcacgggctggtagacgtgtgggccttacagtggagcaggctggagtctgtgtttacaacttcgtttaaaaaaaaaaaaacccacattgttctgtgtactttctctgctctgactccaagacataaatttgaagttcgaacaaggaaattcgtggagaatttcatgtgtctgctatgctgagcgcaggcagccctaccttccgatggatcgagtcttcttgctctccgtccatgcttggagttgttatgaacaaacatgttgtcagaaacagccaggacgtgtccatccacattcaccgttgttgacaacacaacctgcatatttaaagtaaaaaggagaaagggggtgcagtggaattagtttcacatgaagtagcaaatgcaccaaaattctgttttgccacacttccatttggcaaaggggagatgggacagaacttgggactcaacagagttttctccttctgtaattatgtcaaaactttacagaaaaagtggctgcccttcatccatgcattgtcaagaacctttgctcaaagcacacccatgtaatgaagtggagaaaatgaccatctgcctgctggttccagaaacctggttctctatcaaaagacctggaccgccaccgccagtggagcctccaccacagaaagctggtgtgccatgtggaagctgagatctatacgccagctggaaagtcacttcttcaagctcaggaatgggttcttgcacttcagacaggtcctgacatcatgcccagcattgggatgctggctggtgaattgtctgtggtgttgctgcccagtagagagtggtggcagcgatgcctcgacttttgctgagaagataaggttgccataattcagtgttgaaaatagaggatgtgtagcatctaatgagggtgaggggagaggtggtgtggaacagtggcagaacatgggtttggagtcagggagagctgaattcaaatcccaggcttctgtcccctaacttgcaaccatgatcaaattacttcaccttttctaatctcagtttttcttatctgtaagatataaataacaatgtgtatctcacagtgctgaaatgaggtataatgagatataggcacacatccctagtccaagaatctgaaatccaaaattctccaaaatctaaacctttctgagcactgacatgatgcttaaaggaaatgttcattggatcattttggattttggatttttcagattagggatgctcaaccagtaagtaagtacagaatgcaaatattccaaaacccgaaatcagaagcacttctagatgcaagcattttggataaggaatactcaacctgtaatacatataaaggattcagcacagtgcttggtgtgtgccaaactgggatgagtttgcgtcctaactgctttgcccatgctgggcttgaccagaccataagacagatgacattactcacacacagaggttctcccatggtctaagctcggggggaggtcctaggaggaggcagataggaaataggtaccaacagttataaggcatggtccctaacctaaaagagtttattttctggctggagaatcatagttaacacaggaaacaagtagcacaaagactggtatcaaatcgagctccagcatatgtactgcagatcaggggtgggggagaagctcaaagaggtggatatcagcaaaggctggccaagcatagcagaagggagtggacctgggtggagctcccaccgaatcacttgacccagaagacgaaccaccctagacatgggtctatttctcagttcacatcagttacgcatggccattattattgagaaaaaaaaagaacttattatatacatactcacaaacatgtgtagaccttttgaggaagggcactaaataggtacaaaatgaagagtcgtgtttaaaaatgactcttcctgtctactcccaaattaaaacagttgatattctacttgtaattgtccttccttacttattaaatggagggcagggggcttgatcctgtcgtatttttttttttttttgagatagagtctcactttgttgcataggctagagtgcagtggcaccatcttagcttactgcaacccccacctccagggttaaaacaattctcctgcctcagcttcccaagtagctgggattacagatgcctgccaccatgctcagctaatttttgtattttcagtagagacagggtttcaccatgttggccaggctggtcttgaactcctgacctcaagtgatccacctgcctcggccgcccaaagtgctgggattaccgaagtgagccacagctcccagccctaccttacctctgaatatgaaggaatgaggcagcattttaaaaaccttttattatgaataatttcaagcaaacaaaagaaacaggatagcataatgaatccccagtacttaccattcagcttcaagaattgtcaaaatatcgccattctcatctcagctacagtagaccccttatccaagaggtctatgctctaagaccccagtggatgtctgaaacctcagagaatatcaaaccctatattatgctttttcctatacatacctatgataaagtgtaatttataagttaggcacagtaagacattaatgacaataatatttgaaatagaacaattataaaaagatattgaaataaaagtatataaatgtggcttctctttttttctctcaaaatgtcttattgtactgtaccttgggtaactgaaaccacagaaagtgaagcctccaaagtggacgggggaactactgtttaccaccacccactcccaaccccctactcaacaatgataataatcacaggtttgggtttttttgtaggtaaaatttacatacattgaaatgcacaaatcttagctgtccaatttacactgtgatcaagaagtagactatttccatcttcccaaaaagtcatcttgtgttccctcccagtccatcctacccccaccaccagcaaagcaatactcttctgatttttttctttgccctgaagagttttttgatgacatctttttaagttatatttttagcataataggtttgggaaaatccctaaaacccatgagtccacaaatcatctcatatagtgtcacatcttgaacatggtggtaacatatgcaaaattttacatgaataagtgtcagtcatccaacccaacagataattcactgtgtttctaatatgtgacagggcccagagattcaaagaataaacttaaaggaacctcagttgtcattcagaaaattatcaatataattgctcacaattcaggggtacagcctgtctagcgctgtgtctgttttcaattgtgtccatgttaacatgttagaatctggggaaattccttccagaaagttcctatcatagtggcaaacattaagatggcggcatctatcactccccgtaagtgctcacgttcttatcaaagtgatctcagcaaaacacaaggtcatgttacagtcgaagggagaggcagagcctcatggtcgcaaggttaagatgaacatgaagattgtattgcctaccccccgaaaataataggagaagagagagaagaaagaatcaaaccactcttataaattgtgtgtgtgaatgcattttcaaagacataactgtcatctctggaaaaaacaaaacagaaaacaaggagagggtgctttgggctttaattcttccattttttttttttttttttttttttttttgagacagcgtcttgctctatcacccaggctgaagtgcagtgcagtggcctgatctcagcttaccacaacctctgcctcccaggttcaagcgattctcctgcctcagcctcccgagtggctgagattacaggtacctgccaccacacccagctaatttttgtatttttggggttttaccatgttggccaggctggtctagagcttcttaccttaagtgatcctcccgcctcagcctcccaaagtgctgggattacaggcatgagccaccgcacccagccatgggcattaattcttaatgagctgtcctaggcacactaaggggaacctgggccctgtctgaggattacgtggaggtaaagagccttctctctgaggctgctttaattcactccacaagctccttgtcatactgtccattaatactccccacacattcctgccacaaaatatggggctttcacaagccagctgatttcatcattgtccatttgggtggagtgagacttagttccaaagtgaacatttcccgaatgacataccctgatggttcagatgcacttcattattttctattaacaatagaaataaattttaatctcttgctggctcacgctggcctctcatgacagctagggaattaacctgaattatgtcagtgtccataaaatttattacaagattttaaattatgtccaaatgtatgtgtgtgtgcatgtgtacgtatagatatgaggcaagttccaggttttaatattccaaatatctcagatggtgaggtagctggaagagcctgccaattcaactgaattttcaaaatgtgatggatttaattcataaactccacaacaggaaaccagacctgtttggtggttatttctatacatagagacacacacttaaatactgacttttacatacatttgctttacttctggaagaatgaactacattatacaggtgaagatatatttggtacagtcaaaacttcaaatttaagttccttcactgtttactgatgaacagtgacaacactgatattcgtctatttggagaagttaagatttctgaacgttttaggaccaaaggaagtggaatgcgcattccaacatcatcttactcccaggccttccccttccacaagccaacttctttcccctagtgagtatttcctgggtcacgaaggctgacccttcccatctggaatcaatcagtcaacccctgacaacttcctgaaacacctcactccatttcctgttctctcccccttctcgttttccccctggtttgcttcactcttcaaaactgcaggccacagcagcttaatgttagagggtcaggcacagttagactccaaaacactacacaaggacacctttgaccttcaaaaatctttacatcttagctaaacaaatcaaggtcaacatttcttaccattaccttgttaactatttgtatgcatctctgccaagggtcttctgatcatataaccatcaataccacttattcacctaagatcaactgatctgctttaaaagaagcaaatgtagtatggataaaaggtgccattcggaggtgcctgaaactgaaaatcgccagcattatattagcaaacatacggatagtaatccatacaaaggaacttctatgcctcatcgtctcctgtcacctagacctgataacgtgtcttttctaaggctgtcactctattggcactgccattctgctggcatggccctaaagaatgccaattaggaatacagatgtccataatttgtgtgggatggacccccagtttctgctgctgacactggtgacagttttcatttatttcttagagttgatacatctgtattacagctcaaagcctgcagatctgaaaactaagtcatggtaaatgacagctctcctcaactgatatattgcaatgcaaaagcaacaaccaatttatttaggacaaagtacctttaacccaagtttctgagagagaaatcaggatcaattgaaattgcttgcatttttttctaaataaaagtggttttcgccttctgccattccctattttgctttgatgtgatctctcatttttagtaacaccaactcaacaaacagaccaattggagagtgacggtggtaggttccattttaaatcatttaattatatggcaatgttagttggttatacagaaatagaaacatgaataaaaagtctgtatcttcccatgaaaaatacaagaaagttttaagaacggaatctacaagtacgttagcagtcttctaccagttctcaagaaaaccgatcggctttctcaaattctatttttcttttcattccccaaaagttctcccatgtccctcactccaataatttatacaaagcaggagctgagttgtaaaggagccctttcctgctagtaaaaggccacagtgggggtcacccttcaggtggacacatccgttaatctgcctgaacagctaattttccaatagaggagttatttctttagttatcagaatgatagcatgtgccatggagacttttaccaaactgacttattcctaccctttggttatttttatagcccttctctaaaatgtccttggctttttggaacaccgtgtgtgtatgtgtgtgtgtgtgtgtgtgtgtgtgtgtgttttaagtacttatccttctcaaaactctaactgtatgatttagttgaattacataagccaaaggaatggccagttgggccctactcccagctaggctttttcagctcctacccaggtgtttctacaaagaccctaagtctcatacaaagaggctgaaagaaaaagagaagtcaaaatgaaaaatgtgtggaatcaccaaatgatctgctctttgaaacagacgacaattccaatgtctgcagtcactagagaataattacactggtcagaaacctccccgtatgggccagagtctttgctttgaaaacacaccaagttctaccattagtcagacacagttccccaccctttcaatgagggtcatgcacctcctagctgaatgtggggcctttggtagtttaatctcagtaaagctataacacatcgcatttatagcacactccacattgaagactctgataccctacttatgaatgtgcatacactcagctaaataaaatggtctcgaaaattcctgttattttgccaagagtgggaaaaaaaattctttatgacattttacatctggaaatggaattaaattcatgaagtgcttttcccttataactgttcggttgccatatatgttatttcagctttcccaaagcataactgttatgtgggattttattttccacctgtggaaggaggaaagggacagagaaaccattaaagggacagagaaaatcaagacagacttctggctatggcgagcgaccaagctgcagttccatattgcaaggagaaatacacgtcgggtttttacacaatcccgaattctcatcatggacaaggtgaatctaatgacacagttttgtctaagcctccattaattcaatccaggctaacaactaacaaatgggctactgcagtttgttctgccctaccactttattcttggcacacatattttcaagccagatttaaggcccagattcttctttgttatgggactccagagtctccaaaattacctttaaacacctaccccacaagcatggattttgtcattttctttaaaaggaattcccagaattctcagcaatggctgtttcatattcccgaaggctaaattttctgttcagtgaagaatcaagtcccagacaggagaacacagagttgactgccatagagacagatgtgggaggttctgggttgctccagcagagagaagggactgggcatcaatggcattactcctgagaagacgtgctcttttctttttttttaaaaaaaaatacatatttttaattctgtcaagtttaaactgatatacttgatgacaagaatataaactaaaccaacactggtcaatttactcagtttaaaaaatttcttttaactattttacttttttttttcttgtgtaatttcaacttttattttagattcaaggagtatacatgcaggtttattacacgagtatgttgtgtgacactgcagtttgagatatgaatgatcctgtcacccaggtagtgagcataattcctaataggtagtttttcagccctctcctccttccctttctttccctgctagtaatccctagtgtctattacccccatctttatgtccattggtacccaatgcttagcatccacttacaagtgagaacatgcagtatttggttttctgttcctacatttatttgtttaggatcatggcctccagctgtgtccatggtgctgcaaaggacatgatttcattcttttttgtggttgtgaagtattccatggtgtctatgtaccacattttatctgatccaccattgatgagcatctaggttgattccatgtctttgttattgtgaataatgcagcaatgaacatacaaatgtgcatgtctttcgggtagaacaatttcctttcctttgagtatatacccagcaatgggattgctgggtcaaatgatagtttgattttatttttttcattttaactagagaagatactttcttaaggaaccagacagcactgtgtttccatcagtcactgggtatttattgagacccctaggcgctctgctacatgcaatggaagtttataggaaacattgtcgcagccttaaggagctcaccctacggtggacaaagcatagcaaacactagacataatcagaaaatattattgcacggtaatctgtcattgaggattaaactgtggccactgtgtactctaggggcccaacgctgggaagaatcagcataaattgaaggctatcacagccattttcatcaagaaagtgagatttaagaacagaccttgaagaactgggggagttacacaacttgagattactgagatgattattctggcacctaagaagaattctaattggcataaaggaagtagtatgcccaagagctctccgttggtgtattttggctaatttggctttagagtaaacaccttctagagcttacttttaaaaacccaattgagaaatccagtggcaattaaaaaaaaaaaaaccagcttttcatgtcattgaggagtgtgaagatcattcatctgctttgcaatactgaatgtctcttcatcttaaaggccacagatacttgctactcccaccctagctcattttattccattgaacccattacttttcccaactaaaatttgtgccaagtgggatggttacggtcaagggcaatattttactagcaaaagttttgagagccacaggggagccataacatatttgatgcagttctttgtttggcttgggcattcttgtctaggaagctctagccccagggacaacctgaatcacctgtggcctatcaaaaatcaggagcacacaggccctggaagcagctgaggaactatgcactcttattgcaggactaagaacactttgctttccaggaagttctgcattcgatagtcctggaatgggttcagcggcaggtttgtgtccaaattagagtcccttaaaatatttgagcatttagattgtgtttccagctaactgcagtctgacatatcctctcccaaaagtttcccaggcaactactggttttcatttctcaccttatacttttacaaagagctcaaaactcatttcctgggtgagtcagtcaagatttctgtcatcctgattcttgtccccattcaagacaccaaaatttaggggtggaggcagcagaaggttctaacagcagagaaaagcctgaagtcactccagagagccttccccaagcttacatcattggactaagagaaagatcctccgaccctccacagtttttttttttttttctgactccaaatagataattatgatttcttaactaggactatctggtttgttttatcatcagataatggactcacctgctgatcagagaggccataagtcaagtgatttccattatgtgctttaaaactgctgctcagtagcactccggatttcaaatggtagatgagatcacagagcagctggagcagctctcacactgaaagatgtgaactgaagaaacctgcaggcagctggagctgtattaaatttttaccatttggagttaatttaaactctcgtttccctctccaacgggtgtgagagaaacattcaacattttttatttaaggaaaatagatggtggtgccattaaaaagttttatataagagctgggggtttaaaaatcataaggggttgctggatggagcttggctcttttccaagacatgagtagccgtgccctttgctctcacgtcgtttagtaaacccgactaatggctcgtgcccagctgtgtgtacgaggtgtctttgtcagagccattcatttgccccatcgttcttctgcagttgtcgcatccagcatgttgcagcaacaggcacgaggcctctcacatgatccaaccaccctgtggacgccagtcagtcccaacggggcctcacttcctttctccattcccatccggcagatctttctgcccttggttcccttctctcccacaccgggcgcttcttcttgctttctcacaggcctggcagatgcgccaggtgtgttttcaaaaagctccaaccccttccctcgaacccttcaaatccccatcaagatgcccttccagcaggcccatcctgggcttgcatgcaacctggaaccaactcagcactgaaggcttccccagcctgactcctggaatgatttttctttcattagaaatgtgtctgtctggccaggtgtggtggctcacacctgtaatcccaacaatttgcgaagccaaggcgagtgaatcacttgagcccaggggttcgagaccagcctgggcaacatagcaaaaccctgtctctacaaaaaacacaaaaattagctggttttttgtgttgcatgcacctgtagtcccagctacttgggagattgaagcaggaggatcacttatgcccaaaagaccaaggctgtagtgaaccaatattgcaccactgcactccagcctcagtgacagagtaagaccctgtctgtaaaaaaagaaagaaaaagaaatatatctgtctttccatatctactgacatatctcttgaggccaaggatgacacgacctgcacatatatctcagtcttctccctagcatgactctgtaaattaaaaatgattattctggtggacctaatctaaaaagggagtaatttagggggtaaatttgagacacccaagggtctctcatgaaagttcagcaaattgaggtaagcatctttatcttaattacaagtaagctgtcgattagagtgaagttcattaaaaactaacctgcacattgtgcacatgtaccctaaaacttaaagtataataataataaaataaaaaataaaaaaagtgagaaaactaaaaaaaaaatgattaggcaggatgaagagaggttggttaatgggtacaaacatacagttagaaggtgtaacgtctaatatttgatagagtggggtgactacagttaacaaccatgtattgtacatttcaaaccagctaaaagagagaacttgcaatattcccaacgtagagaaatgatcaattctcatgatgatggatgactatggataccctaactactctgacttgattattacacattcaatgcatgcaacaaaatattgcatgtaccccataaagattgcaaacattatatatcaataaaaaaaatttaggctgggtgtggtggttcacatttgcaatctcagcattttgagaggttgagacgggtgggtgaatcacttgatctcaggagttcaagaccagcctgggcaatgtggcaaaaccccgtctcgataaaaaatacaaaaattagccaggcctgatggcacacacccgtagtcctagctacttaaggggctgaggtggggagatggcttgagctggagaggcagaggttgcagtgagccaagattgtaccactgcactccagcttgagcaaaagagtgacatcttgtctcaaaaaaaaaaaaaaaaaaagttaatgatttttgaggttggactgtgtcaaggatctcaattccagaatgctactacatctgaaacgacctaatatacacgcttgtgctgcccacaggatagagaacaccccaatgatcatgtatttttaaaatgaagtccttttgaggcagagggtaaaaactcagcattcaggcctctaagcttcccagtctcaagtagatctgctgacatttgtgtcctataataggtgatgctgtggaaagctcagaaaactattcataagagcatccacacttactgttactataatggtgagtatcatttagctccacaaacatctatacttgaccaagctgctgagttccagcaagcaccacaaacacagctggcactgtacggaagcccactgcttccaggaaagtcacctgaatgtcacagagaagcagacttgagctatgcaaaccactcatttattttttatatccttccactaggatgcaagcccctcaagggcaggaattttatgatttgctctctgctgtatctccagcacctaggatagtgcctggcacacagaatttcatcagtaatattggctgggtgcatgaataaatgaatgagtacctctatgttttcactatgacttggaatagacccagccatcctatctatgacagtgaattagcaacaataagctctaaattattgtcaattcctagtgatttttagaatgtgaatgtgggaaatgaccgtgtgcctgacttcctcttcctagcttgattttcttttggattttacaactgccttcactccacccacacaagcagaaagaaataaagaatgggattcattatgtcttaacaggcctgtcagcttaaactagacatacatttcttttcttttccttcattgagctgttaatctgggtgtttcacctaattgttccatttcaaggagggcagaagtgattttccgcatgcatgacccatggatttagatactttgaggagccctggaaatcttaagtttgttttctcttttttccttttttcttttgctctcttaaaaatttatttaataataatccattattttaatcaattattttaataattaatctatttatttaataataatctacagaatgcctgccattatgctagacattggcaatacatacaaaaataaataaaacatatcgattgccttcaagcagcacacagtctattggacagacaaacaagaactgcaagatgatgtgataactggcagggtaggggcctgcagagaagggtgtgtcagcacagacccaggaaccaacagctccatttggaagagtcagaaaatgcatcactaaggtggtgacattcagctgtagccttaaagcatgaaaaggagtcacaagttggagaggggtgaagggttcccaggcagaggggtgaacatatggaaagcttcctagatggaacagaaatcagagatgggtgtgtggtgagcagcaggcagatgagaacttctgggacaggcatggcaggttttcctggtaggcagaggctgagtggccttctcagccatgcctttttaaatccaggctttgtgtccatggacagttgatacccattttagtaggtgtatgtatttaatttttatggatacgtagcagacatatatatttatagggttcatgagatattctgacacaggcatacaatgcacagtaatcacatcagggtaaatgcggcatcctcatgacattttgtctgggtttttttttttttttttttcctttttgtggagaacaaggtctcactacattccccaagcaggtctcaaactcctgggctcaagttgtcctcctgcctctgccttcctaagagctgggattacaggcatgagccactgtgcctagcaccctgacatattttaagaggtaactctggcattcatgctgaggacgggttagacaggggaggaataaagacaggggctacagccgggcgcggtggctcacgcctgtaatcccagcactttgggaggcccaggcgggtggatcacgaggtcaggaaatcgagaccatcctggctaacacggtgaaaccccgtttctactaaaaatacaaaaaaaaatagccaggcgtggtggcaagtgcctgtaatcccagctactctggaggctgaggcaggagaatggcgtgaatccgggaggcggagtttgcagtgagccgagatcgcgccactgcactccagcctgggcgacagagcgagactccgtctcaaaaacaaacaaacaaacaaacaaaaacagaaaaaaaaagacaggggctgtggcagcttttgaggagagaggtggatttaatagatacttaggaggaggcagcgacactttgacaatgaaagaggagggaatgaatcagggaacaagcagtgagttctgttttgaacacgtgctcattagtcatccagggaagatgcccagaaggaagctagcattatatgcctgcagctctaaagaagtctgagaatatggatacagaaatcatccaggaacagagagcatttgaagccaagagagtggatgagagatcaccaggaaaagtcctaagtggacagatccccactgttaaaggttaccttacatgaaggatgcctattgggctttaaatgaattccatttctttagactagaggtccatggaagcttgagatatttcaagtggtctggagacccctgaaattttaattaaaactttaaacgtagtatttcaatgggatacagactatagcttttaccagattcttaaaggggtctgggccaaaaaaaaaaaaaaaaggttaaaaagggttaaaagggttaaaaccctttgtgtttcagtattttttatgtcctataatacttaggacttgaatgaaattaaagagaggattggttcaagcttgaaaataaccttgatgtaacaattttggtctgattggatgatttttgtaaaaagaatccaggttccaccagtgtttgggggtaagggaaggaggggggagagttttatagagttcaggatttgggtagaaatttttcatatttctattccattcagatcaaatcctcacgaaagaatccttcatattaaatttatgtttgatcatatcacaaaagtagagaattgaaggaattgtgtatatggctctaaatgattgtctttgtccttctgagtgagatacatactctaggaatttctgaaagtcaccatccattcagatgactgtcctaccaccatgagtatgcactctctctggttttgtttcatatttggaacctgaactaagtttcttacttgactatgatagcatattgctaagcctgtcttcataataaccttctctatgagagagctttcattgaaggttatattcttagtagaatctaagtacagtataaaaattgccaattcttttgtgcaccaaaggacactatcaagaaagtgaatgacaactcatggaataggagaaaatattttcaaatcacatgtttgagaaggagccagtatcctgaatatataaagaactcttacagctcaacaataaaatgacaaataatgcaactaaaaaatgggcaaaggatttaaatagacacttcctcaaagaagatatacaaatgagcaataagcacatgaaaagatgctcaaaatcactaatcattaaggaaatgcaaatcaaaaccacaatgagatacctcttcacacccataggatgactagaatttttttaaaacagaaaatcccaagtgttggcgaggaattgacaccttcacagattaccagtggaaatgtaaaatggtgcaaccactatggaaaacagtttggcagttcctcaaaaacttaaagaaacaattaccatatgacccagaaattctgttcttagttgtatacccaagagaattaaaaacatatgtcacacagtgaaactgtgcacaaatactaacagtgtcattgtttgtaatagccaaaaagtgagacaatccaaacgtccactaactgactaatgaattttaaaatgtgatatatccatacaatggaatagtcaagctgtaaaaaggaatgaagtattgatacatgctatcacatagaggaactttaaaaacattatgctaacagacaaaaacagacacaaaagccacatattgtatgattctatttatgttaaattcccagaatagacaaacctatagagacagaaagtagattagtggttgccagtgaatggggagaaacaggaactgggagacatgagatttcttcttgggataatagaaaagttctggaattagatagtggtgctggttgtacaacactttgaatgtactaaaaaccactggaccctgcacttttaaatggttaaaatggtgaattgtatgttatatgaattttatctcagtaaaaaatgcaaacaaattgccagttgactttagctctacccttgaaataagacaatcagagaatccacaaagtctaaacaattctttttgcccttgtctttgcaaaagtcaaatactttcacataggatgagaattctatatcattttgagatcaacaatatttattctatgccaatgaaaaactcaggcaccatgaaaaccccatttaagtaaataactaaagaagtagaggaaatattagcatgcatttgctttgtgaatatattcctaaactttgggagaaagaaaatgacaaggcattctcctacaatggaagcctcttcacatttacaagagtatcctcaaattctcaaatttaaaactctttgaaagtgctggtagaaagtaggatggaataaaaatccaaactgccaactctcttttctctgcctctgtatcttctagaaataaagctaagctttggtcatggaggcactttggaattcttttgaattttactcttctttggactgaaattatttacatttttatttggaatattgagcacagtgaatttccaccatgcacgaagttcctgtttgatcccccaagaaggctggttttatttctgtttttcttcatacaagaaagtaggcccagaagcggtggctcacacctgtaatcccagcaatttagaaggctgagtcgggtggatcacttgaggtctggagtttcagaccagcctggccaacatgtcaaaacctcatctctactaaaaatacaaaaattagccaggcgtggtggcatgtgcctgtagtcccagctactcaggagggtgaggcaggagaattgcttgaacccaggaggaggaggttgcagtgagccaagatcataccattgcactccagcctgggtgacagagcgagactccatctcaaaacaaacaaacaaacaaacaaacaaacaaaaaaaggcagggaaacagcctgcccaagagagaaaaagtctccaactttttaaagggaggctggtaatagtgttaagtattgtaatgaaaaatgttcctgtcacagcaagattgatagccatgatggggttaaaaaatactactactagtttttttttcaaagtaactctcagtagcccttgtgtatggccatcttcctgttaactcttgaatggctctgctcctaaacatctgtctgattgtggcctaaccacagaagctctccagcaggaccagctacataatttgtagggttcaataaaaaatgaatgtcacattccttgttcaaaaattattcagggtccgatgtggtagctcacacctgtaaccccagcactttgagaggcctaggtgggtgaatcacctgaggtcaggggtttgagaccaacctgggcaacatggcaaaaccccatctctaccaaaaaatacaaaaattagcagggcatgatggtgcacacctgtagtcctagctactcaggagggtgaggcatgagaatcccttgagcccaggaggcggagtttgcagtgagccaagatcacaccactgctctccagcctaggtgacagagtgagaccctgcctcaaaaaaaaaaaaaaaaaaaaaaaaaaaaaaaaaattattcagaatttcaagaagacaacagcaaaagataaacctagcagctgcaacgtgtcgcatgcccacagtgtgctggaaagagtttgatcaaacaactcctcccggctcctggctccgggctttaccacctacttactgtgattaggggcaagttatttaaccttccagaacctcgcttgtctcaggcgaaacatgaggctaaggttccccatctctctcatggctgcaaggatttactttttgaagtctcaagcttgcatactatcgtttaacatgtttttaatttttctatggaaaaggaggtgccacatctagaacggggtgtgagtggcaggaaagccatttggtgaattaaatatgggtccttcaaagctcaaggaagggggccgagaggagctgctcttgctttcgtctccagcctgatacactttgcctcgctctgtttttattagctcgtctcctcagtacatcagtggcaagggtgatgaaaccggtggcagatttaactgccaggcagctgggtcaccgtcccgtgggtcttgttgtcacgctgcgatcttaaagtgaccacgctgcttgggctgctgccttccagaaggctcagagagcgaccactgaatagttaatcggtggaaaagggaagacaggagctgttgcttgcagaaaatacagagaagctgctctgaaaaatcccaaggtggctgaatatcaagaacatggttcctgctgtgggcagctgtgtgtgcagtgggcagcccgagggctgaaaatcaaatctccagcaccggttggtgcctctccccatagggctttggcaatgggggcagaaagcttaaacactacaagatgaagaaactctcaatgctagtggctgagggtcatcgtttaccattgtcttttttattgttaggagtagcagtgaatagtaatttttaaagaaaaagaaaataaaaagagtgagaaggagagagaaaacaggatgacttatttaacaggaaagatctgcagggccccttacctgaaaccgtctcatgtcccttgggtttcctgctgttttcaaacaattctgattgcacttgaggaaaaattttaaaaagaatctgtgaagagaaagcgatgtgttacatttttcagtaaacatttttaaagggagaatatagctgcattccattagatttgatttgacagcgattctatttcagatctggggaatttcaacctgccctgcctgtgaaggaacactgctgaccctctgcaatttgcaaatttggatgttttcaatctcaagcccagcacccgcttccccatcactgtgggggattgttaagtggttcacaaggtgggctttggtttgtacactggcccccggagtttgtagagcactcgttctggaaaatttttttaaaaaggcttcaaatgcagcagtgacccctgctgtacagaaagtcttgctccagggttaaaaatggcaggacccggccccagaatcccagggcgtctcgtctgtgtggctctccactggccccagacaccttcatgctcatacgtgaaggtggcctgatatattcaactaatgtttacaaaatcagaaaatgatatgttatcttccaaagacaaagtccatctgtgcaggtatatgccagagtttttatgattaataagaagtgtgaatatcctctcagttcatgtatagattattcagagaaacatgaaagcacagaatcatggtctgaggttagcatttgtcatatatatttcttgaagccaatattctctcttaaatggcctatctgtgcaattttaaaattgggcatctttcatcaggcaactacgttaaccaagaaaaatggcagaagtggccttttcagcaactcacctagttaatgtttgaaaatttgtttcaaaatacagtaagtttttcatttatttcacttgcagagtcctttcccttaaaaaaaaaaaaaatccagcttttgcagtgttaaagtcccaggtgagctaggcctatttccctttctgttactatgacaacgaaattttaccgcagtcccaaagtcccttcagaactctcacatccatgtcttgaattagaactttaaaggaaaagatatacattttcctcaggatttacaaacaaaaataagtagaaatcaacaatgcttccaaaaattctattctaaagcaatggttggtgaaatgttctcattgcgacgttctgatttttattttttgtttaacaatcacacaaaagaattagatagctctccaattaaatgtatttatcactttaaaaaactgatgagtagataaacagtaaatgataaaggaggagagaaggggaattggcttttcagagtattttctgtgtttgaggctcttttactctgtttgctggaaatatttggccacatgctcccatgaataaggttgagtgtgaatttgaaagcaacagctaaatatttttttcatgattttataacatctgcttttcacttctctctttcaatcttttatagggtgggtgggaggttgggctttgcttcctgtgccccggaggtgttggggtctttatggaagagacctgcggaaggataaggcagagaaaatgttgtgcgtggctgtccgacctcagtgttcaaattcacaacctgccgctgctttctgaacggcagtagcatctctgcccgggtcgtcagagtgcgttagaaaggagaattgcttttatgtaagtaaagactgatcagaattcaaacattttatttcttgaagggtaaacatcccctccgtttgtacactcgtagcagagtcagccacggacactcacaatgcttgcaaatattgccttttcccacttgtgtgtgtttctgaacaatagcccccgctgcaccccacactggccctcaaccactcccagcggcaatttacgacttacatttttcccctgctaaacccaaatggagggctttttctcatttagtccttgatttctggaaagttttgccacaactgtgctccttgtaatgtgttctgtgtgtgttagactacccccactccccgctccaaaatgtatctggtgaaaacattaatgttcatgaaggcattattatatgaatggtgtggtaggtggaaaagtgcaaaagagataaatgtttacataaaatcaaattgatttagggaaacatggagcctgctgaaaggctttattcattttaaattaggacccttaacagtgatttggatggaaaacacctagtttgactctttgcttgtctggggggctgaatttgtaacctacacagccccgtgcactctgaggacttagcactgggttcacgaaggagaaggggaggttaagtgggaggaggaagagggaggtgagtgagagaagacagagacagaaagttctcttgcattacatagtatcttctaaaagaaggtattgctacttctaaatggcttgcaccagaaattatggcctggattttttaatatatggatctaaaaattaattaaaagaaattctggggcttactgacatctccatttttttttcctcttactttaactggtgtcttctggttctccgccctccaccctctccatccaccatgctcagggtcttgatacaaaaccttcactaatcataccatccatttagccacggggtaacttacagggaacaaattctctccaaatcccctgggtctagatccctcctgaagccagagctgcctggaaaatgtcggcactctccactaagaaacgggaaacccagataaattatgagattcagaccaaatgtgcagattatcaggatgaaatctatttccactttctccaaacaatgttgacaacgtgaatatcataaccacggtgcatgctacacacgacaaagcttctgatcccattccttaagagcgaacactaacaatcacaggtttatcctcatgttacaggatgaagaggatcggaaagaggagtcaacatggcaactcaaaccttcagatggcaatccggtccctaggtcagtggggcaggagaatgtaccagagcattcctttactctacagatccattggaaatgccccaagggttagccttgacctgtggctaccaactgaccacaggaccaagttacctcacattcattctctcttaacgaaggagttgaatgggatctgtagggttctttctaacattaatattttatgactgcaaagaaaaatgtacagagttgagaaccttccttccaaaaagggttacagtggggaaagaaaccactgaaaacaagagaccatgacttattgaaacctgagtgggtgtggcagaggtgggagtgagggtttctgagacgtaggtgaaacccactgagataaaactgtgaaaaataaataagtggggacagctgactggtgggaaataggacatccagggtgacgccgtgcccagagtgggcggtgccctgaggctgatgggcagattgttgggtgagttgcactgtccctttaggaccctttctctctgcttctgaggcagggagggtgcttcaggaatatcacagatcagagccacctacataacctctaacaatcctgcacggtccagcagctgaagggtacaggggtcacggagtggagggaaacacagtttgctgagtagccactctgcccaatacacaacactgtatttcattctcacaacaaccccatgggtgacgaatcatcctacggctgggaaaaacgaaggcctcaagaatttaagaaacttgccaaagatcataagcttgtaagtggtgaacacaaggattggagcctggatctttgtggcaacaagctccatgtggtgttgcatgtttcctgcaccaatgacactgtgaagattgctgcacagctgggtgaatatactagaaaccatcgcattatacactttgaatgggtttcctttgtaatatgtaagttatatctcaatacacctgttattaaaaaaacacttcaaaatggtctaaaaatggcacacacacacacacacacacacacacacacaacaggaagaataaatcaggagaaaaaaaaaaagtgaaagattcttgcttcttgaagagactgcagtgtcccaagttgaaatcagtagtcaaagatagacatatggaaacatggaactaaatgcttaatattgaaaactgctgaattcatttatttactcatttgatcaatatgtattgtgctctgtgtgccagaaagttcaggcacagtggcaagcaaagtccttggccccaaggatcccccgaccaaactattcaaatacgtttctccagattctgaaatgagtctggagacccctgaatctattactgaataccctcctttccaatctctaacatactggaatatcctgtactattcaggaatacagtaaaagtgtgtaggtggcttccacatgtcttccgccatcccacccatctcaaacgagatgcacaaatacagtgcagagttaaggttccgtggtggggacaggaggcttgaaatcacaggaaaggtaactacttaatattcttgccagactctggaattctcatcaatggtctagcacaaaacccagcacaatatttctccaggatttatggaagaggccattcaatttacctccaaattggaatacaagatctagttcctccttaaaatttttaatacaaaagaagtccataaggccaggtgcggtggctcactcctgtaatcccagcactttgggaggctgaggtaggagtatcacgagatcaagagatcgagaccatcctgaccaacgtggtgaagccccatctctactaaaaatacaaaaatcagctgggcgtggtggcatgcacctgtagtcccagctactcaggaagctgaggcaggagaatcgcttgaacctgggaggtggaggttgcagtgagccgagatcacgccactgcactccaacctggtgacaaagtgagaccccgtcagaaaaaaaaataaatgggaattcacatagaaggaatgtgaacttagtagtagttaacagctaccattatacagaacctgtctgtatacaaaataatatgcaaaatgcctttcactctgaaaacttagttccttactcccttaaaaaagaatctaattctgcctaccctggaaacaacttctgctatgataatggccacattttatacatcacagggatgagaacaccccaggctctccaaagaccaagagaggggatgctgtatctggttctctttctctgccatgatggtcacataagcaggctaggtcactaaaggctgagtcaaacgtacagttgatatggcctcacagaccacatagggacttaaacacgtgtgttcattgattttgcagaagacactttctgtctggattagctgttaaacctccttgtttttagcccaataaattaaaatacaattgagtttcattgtttgtgcatgcctctgaaaaggagatggcccatttcccttaaaacactctcataccatttctgagaactatgcaatacagggacaggctgggtcatagaatcacatttgaaaggaatgggcagttgcctctcttcttccaggatcctctccacaagtttacatcctttgggcgattaggcaatccaagctctcacaccagactgagaagcctactgggtggccacacccatgagttcattttctcactctgagaatggccctcatagcaactcactctgcttcgtatggtaagaaaactcgcaagtgattgctttccacttgagaccagagaaaatcttaacggtggtgttccagttgtaatctagatcttaactggaatatcttctttgacccttccaacaacagagaatattctttcctccttcaagatcccccagcagagtctacacccaggcagccctagggaaggtgaaggttagcagtgggacccagccttggcctggagatgaagtgccctggatacatctattggttgttgaggtgttagcccaggctacaaagggccctgaagcttttaagatcttgtgaagactctgactaaagtccacaagaatgaaaagactccaggaggtcaagctcccaatgggctcttgttacaccctacagtaacttggtgatgacgcatctgagaacacttggcttagtatttgagatctgcttggcaagatggtggctagcacaaaagcccaagaagattcaaggaaaggaaagatgacttaatagttttgacttactggcttctttaggcttaaacgaaatgaagtttaaactcatttttgtaagctgatgttctaccgaatccatttagttaaacaatccctcaaactgtaaaaataaacacatgaacagaagaggtatagaatctttaatctccacagacattcctaaggcagggacttattaccattaaggcttgttcacccagattatttcaataaaagcccatttaagatctgaaaaatttaactttacagaaatgttttaagcaataaattttcttatttccaactacactcaacttctcaaattcctcttgcctaaaagactatgatgaaacagtaattataattaataatagcctatattcattgagcttatattatttgccaggtatgatttcatgtaatcttctcaactttgggaggaggaaaattaacatctccaccttacagaggagataaacaagattcagaaaggttaaatgacttgcccaagtcaaaacagctagtaagcagaaaaaataagagtggaagtagtctgtctgactcttagcaaaatgctggtctgttgggagcttggccaagctttggaaaaaaaaaaaaaggctgaacatgttgccacgcggcactgtttcacaggacaactgccttactgatccacatgggggatcctgtcattgtcttcctcttctgctggaataagagtggagtccttcatgttgcaaaataaaacaagcaaacaaataaaaatgtctaccattcctatcagggagtgcactctctagaagttctgtgactattttagaggacgcaaaggaaaagataaataaatctatcagatattcagaaaacaaaacttctcaagaacccaaattgtccaaagagatggcatagcccaaatagcttcagccttttggaaaaaaaaaaaaaaaaaaggttactcaagtgcatgaggaagattcaggaccatttgtctatgaagacgatgggagggaaaaagctgaaaatcaaacgtggaatgaaagaagttgaattaaatcttggaaaacattttttgggaatcaagtcaccaaggctaaattttggaagcatttacccaagggacagagcaggatctccataatggagatttttaaatagaccagcaagctaatgcctttggtagcagataatttcagtccaatatgcggcagctaactggggtgtccataccaagcccacgtgatttcatagcttctacagtggcaatgatgatgatgattcaatttttactgtaaaaattagggactttcagtaacaattaaagaccttatggccagacgcagtggctcacatctgtaatcctagcactttgggggccgaggcagtctgatcacttgagatcaggagcttgagaccagcctagtcaacatggtaaaacccagtctctactacatatacaaaaattagccaggtgtggtggtgcacacctgtaatcctagcgacttgggaggctgagacacgagaatcacttgaatctgggaggcggagtttgtagtgagccaagattgtgccactgcactccagcctgggctacagagtgagactctatctcaaaaaaaaaaaaaaaagcaaaaaacccaaaaaaaacaaaaaacaacaacaacaaaaaaacacttttcaaggccaatagtgaggactagttattcatgcaaagtgtttgggtaaatgcctggtacaaagtaagtctgcttcttcaccttttgctacacatacgtatgatcccttcccatgtattgcccctttctcccccaccacattttaaaacagcccattttccagacaaaattattccagaaggagctgtcacgaatttaaatctggtcctctctgccctgcttatctctccaatattaatatatactacactggaagaacttcccttaatttttaagagagagatagtaaaagaaaaaaaaaccacacatgtcattaatccactctcacagatagtaggggagaaaacaacatcaaaaacacaaaaaatggtcgatgggagtcctcattcctgttttcagtaaactctggccagcaaaaaattcagagctacccacacaatatgctggcttctgactggcaacaggccccatcgagtcactttctattccatgctcaagtccctggaagtggcatttcagtttggcaagagctccttcatcactcaacacactgccttctgagtagaatctgctgcattcatttagacatcaggaaggagctacttcccccactatgtaaatctgactccctgactccataccgatagacttcatttcaaaggaatttcattatttcctctgaagggaatgtctcccatagcccaagtggcaagcagttgactgtaaacggctgctgaagtgcaaaaacaaggggccaatttgattctccacttatttctgattggtaactacagtttctgaggacctggggttagatgttgtgaggtttttgtgtgtttgtggtttggggttttttttttttttatccccccttctatattcagacgcatcttcattctgctgaattctattcctcgacaccatgaggctcacagggaaaaaaatctctgaggaaaagtccttgtttttgtactcagataaaaatctgacaccattaatgaaaataataattgaactctttgggcttgaattggaatgagacacacactaagagcatgtttgtaattctaattgttctcacaaaatgtctttggagggctctttgcaaagcacaagtttccatcctttcctttttggtaaaagaaacaacccatgtcctcttctttgcccttatcctttcctctgtcttctcatccagaaaagaaaaaagaactcagcaaaactgaatcatattatggacttccttgagaaaaaaatctttccgtgagacttcagaatcagaatacaaatctatttcccttgccagtaccatgactctcgggtgaaggagagaaatgaagttattagtcagccatcagcttaatgggtcctcaccgtcccatttcctcagcaccccttccccatccttcccctccccctcccattctctgccctcccggcagagctcatctatgctaggctgagcagtgaacaccaattacacccagagccctttgctgctgcctggtccgctggttttactgttttgccagatggttgaggccaatgtgtaaaactctctaccctaccattaattcataactcggtaataactttcccacgactccaggaaattgaaatggagtgcaaatgtggagatttggaaagggaatcaaggttggacaactatttcacacctgccagaacagataccagtgagacaaaaagaaacccttatttacccaggctggagcattactttccctgaactaaggcagaatgacgcatcatgcaatgttggagaaagtggcggacaaagttcagagtgtgggcttctcctggcatcattttctctctgcagttttcagctttctacctatcgcaactatgggttcactctccaatgaccttgagattgtgcatctatgtaatgttatattcttatgacagattcatagattagcagatatgagtgcattctcttgctaagacaggacaccatccaatgtttgttagcatcattaaactaaaactgacttttcacctgctcccataccatatgcagctgcaaatttctaaattaaactatgaagccatgcataaatttacatatattacagactagcctctccatttaacatgcaaatgtactccaatgtttcagaacaccttctgtcgctaattaatttgctgaattataattagactaatcctgcataattaataagcacagatttttttttaatttgtaagcagcttgaggagatcattcacttccttctataaactgctaagtaagtgttaaaaaaaatctggaaagaacatgtgtgaaaaggtatgtttgatgtcgcatacaaactcaaactagcgtggaagatacagaagtcagtattgataaaggtacatatttgaagccaacattcaaacaatcaaaaaaaaatcatatccagaggatggggtctaattctccctttgtctccttgtatataacgttttattctttgccttctatccgtcggatcttccaagatcacagaggcgggaaaggattaaagtaaccgtatgttgtattaggagagataatgatattaacactccactgtatatcaaaacactctgtgcatgctgggtgcttataagctcctttgatggtatttggaatcattttcattttggctgccaaaaacacccgagatccatctagtggaaacaattaagttccattaggactgtatccattcggtaattattacaatgaagggtccctctttcatgctggagagtggagtctcaaagaaaagtatgcatctgtgcactgaaaaatgtgaaaactatagagttttccaaccaagcatcaagcttcattttgactcccaaaaataaaccaggatcagcagagctcaaggtttgggtaggtcacttgttagaaaattcagagcagggtgggaatctggaagggcaagggaagcttagtggtcatgcaagttgaggaagactccagaaagaaagtaggaaatgcatgttctggcaaggagaagtcagtcaaccttcaaagagaggagaaatataattttagagcaaatagagagctccctggcccttccactcagcaaagtcactatactatcagtggccaaaagattaagtcaaaaagatgaagccatttgaaatgtgtttagctttctattaattcagttttttatagtgagtctataaaaagaaatttctgaagaatggaaaccattttcccaggctcattactgtcttaaatacaccttctcaataccaggcagccaaaaaaaaatttttttttaaacaaagctacaagataagctagcttgggagttgagaaagttgaaaagtacaccagcacctcggaggctgttggccaaagccgggagcagatgccaggggtactgtttctgcttcttccctgaaagatgttcatgtgagctgccttctcttctccttatctggaaggagaacccagcaacctcctggggctatctattgcaacaactaactcaagtgcaaaaaatattttgaaagcacctggaaaaggctgtcacaggttttcagagttaagcaatgctattacttgggtagtttggaaacataacacttttggagagtttttatatgccaaaccatagcttttgcatcagtacccatctaaagagattaaatggttcaggaatttttttttttaagcctcaaggaaaaagagctttctgtgtttctagtagtttcttgaaggaacatgacagcagctggaataataagactaataagaggccaaaattattttctctcaaaagaatacacaaagggtcatggaaatctttaataatgtcctcacctttcaggaaaaatcatttgaaagtattatgcttttctttcagattcctcatatcccgttttgagtggttataataggaggcctggtttctctgtagtcaggaacatgtgcacgtctgtttttataaagcaagaaagtgcttaatggctaaactcacagggtgaaatggaggctttcgccacttcctccataaagcactggcctgagactagagcagaattgagagtcagaaaaagctaggcaggtccttcaagcaagtcccacctattgacaggcaagaggttttgctgaagttgggtttggggttgtgttttgtttggctattttcttcagctttgcctacccaatttcaaactatgtactagtgagagcaggtggagagaaagcgattgtgacccacgcagagttagttagcttttgagtaattcctaatcagctatgagggagaaagaaatttggtggcatttaagcaataaggtgtaaagcagttagttaacaaagctgcactttggctaatggatttttttttttcacctaatatacacattccaggaaatttctctaattttatattttggcaggaggattttcctccattcacctcacttctagtttattcttgtgattcagtctctctgcctcctcctttctcacctatctttgctctctcccaagtttccaaattctgaatgatgtagtgtgctttttttatgtgctacctaaaagttggtgggggtggggagcagtaaattgggaagaagggatgactgaaatagagaaaccgagatggtaattacagctaggctcaattttatctgaaaactatggtggcttgcctccatttcagccatgaagatccacatttacagtacatataacctttgtgccaaaaaaaggaaaaaagaaagcacctgtaggctaacaggtagcagttggtacctatggaattatcattggctattaacactgggtcaggtatcatattagccactttcagatgcatttgccaaacccatgtaaaaatataaaaccaggtatttcaatattctgtcattccctaagcaaaacagattttcttatattactcatagtagagtcagccgactttcattagaatttttttaactttctttttttttccttaaagaagaactaaacctagatgatataaaagagaaactgggacaaaaatcaggtcaagaatttgatacaaaaggcattcagataaggctaataatattcccgagtgtagtcaacagagcagacaatgatcacatcggtctaagctctacccaacccctatatctgtacaagattccaggaatcaggaatcagttatttgttctttttgtcattcaaactttattgagcctaaagcctctattaactctatgggaattatcaactttttggaggtttccacatcttagtaccaaaaatgaaatctttcttttaaatataccacaagagaatgttatctgtttcacgtttctttattctctgtaaccccattgcattttgtgctaactctggtcatcttgcagaggacactacctaattaatttttactttgctcctaagtagatgtccagaatctcttctttcattttctctttaaaaaattgctcctcaaacgaaacgtctcatgggagaaccagagcttacaccagacctgagcacgctcccattgagaacaggcgcagcccctgggcactgcttctgtgcacctggaatttctaatctttcttcccatgccatatcacattattgctcagaaatatgctggattcttggaacaaggtgaaactgagccaccttgtttcaaaaatggaggctaggcatgaaatctcccatctcatttggagtcactaggatttctcactccaggttcaaagaaaggctcaatgtaaatggggcagattcatgggactcccataaatcagccccactttgctgaaaaccagaacctgagtttatgttgaagtttcaaaagtgcttggctgagcccagcccaaacttcaactttccaaataacttccaaactgatgaggctgtttttgcttaaaaaaaaaaaacaaacaaaaaaaacacctggttttatgtttcacaatgttttataaatctgcatttataaatctgcataatttctaaaaattagcatttattttaggtacttattcctacctttcatcaaatgacattgattctcaaagcctggtgtggtagaaatgtgtttctacacagtacgtttacttaagatcatataataaggatgagtcaaataagaaaagctttcttgagaaaaagaatgtggggcttttagatatctacatagatcctaaactttaaaatagttcagccacccatttcctctgccagaacagatatcattattaagtcaacacactcacatccatatatttcataaaaggcagggtaacaaaaaatgtaaaagttgcatctagtccccaaaagttgaaactttcagtgtcactggctctgtcaccttctactgcctttgaaaggagtgctgataaaccaaatgagccctctcaagctctttttggaatgaggcagagaattaaataaatgacaaaatgttttaacatcagtggtgggggaaaggcctaattgacacgctcagtatccaataatctgcaaaagccagagaccattttactgacatgattctttctgaccctggagtttagagttgggtttgtggtttctccctacacagtgaataatggaatacaactactaaaggaaaaaaaaaaaaaaattcatccgttggagaatcagcagctgacctggaagtaaaacatctcagcccttcactcagaggccacagagcctgttctgctttctcagggagttgccaggactcaagtgagcagcaggacagggtccggaagcatgggaaagagacagccacaggtccctcgggaaggcgcaccgtggagtcgccccagccacgctgggagaaaggccactctgtgcagggatctgacatcaggctctccctggcaagcccataggcaggataaccactcccagaaatggcccagagagtcctgtggcccaacaccatgataaggaaatcatctagtttcatacatgagtcagaatttatgagctcctcattcaacccaaattgaagctacaattccaccattcctcctggtagaactctgccttgaattaagacagaacctgaaaaatcaggcccggtatttttgttttctttaccatctctcagcttgccagggtgatcacatcaaaatcatgcagaacacacaaccaggcaatgattctattgtaaatgtatacacatatatgtctataaaaaagcagatttcgtcactcctagtgataagcctgcttcaagttttgttttttttgttgttgtttgttttgcaatacaagttctaaactgatcaaaaggtgttcctatctccctgctttgttagccagggttgtgggtacaggagcattttttattcaagtttgatagaattcaaccaaagggcctagtgagggccaggtcatggtttttcacaatttgtcctcatctggaagtttattattctgttaggaatattttctaacccaagacaacaataacaaagccttttttagtaggcaaagctaggccaattgactttgatcatttttttaatgataaagcagttagcagattaattttgttcttagctcttttaacctgggctgaatgtttatgcttctcctaatgagatgatgcattgaaaagtgaagataaatgtcatctacttttcatgtgatctataaaattaatctcccatgcttatgttaataccgataatgtaatgtaggaggcagtgtgacctagaggataaaacttaagaggaaggcactcatgttcaattacagtttatattactgacaatattttcatctctctgtgtctcacttgcctactctcgtccctcatacaagtcccctcacatatcttccctgtaaaattgggtaatgcctctgagagatgctgggagaattacttaggtgctttgggaaacagcttaaaacaccttttagaactttcttgtgaaatagcagatattgttaatgttcctaccgtaaaatcagcctctggtaagtaaccatgacacacttagcaattgtcttcctactcagtaaaagtgatcctccccagagctcaggcaagtgaccctccacccacagggttctgtttatttccagaaaataaattacacggaaggagggcgcgatggatggtaattaagtcaccaagttagggagggatcaatgcttacactttagaggttaaacgaaaagctgattacatcaggaaggaatccatgttctgtattcagctgtaaaataaactgggagttttgtgtttggtgtctgaaacatctttggaaacactaaatcaatttaatatcaataattgccagatatatgctagattaaatgaaccaacacagatagctttgttcgcagagaaaacagggccaaatggctttcattagcatgactaatcccgaagttctgtggtttgatgatcagacgtctaaacctgaattttgattcttgcaaatatatgatttggcacaagacattgcaagtccagctatttctgtacctttaacatacatgctgaatatcagagaagccaggtgacacttaaagtgcctatatagctacaactgtacccactggtgcccagaaacacaccagatgcacagaaaataaggaaatcactctaacacaggactgagccttttcccagacctgtttttgggggctttggaatcacctgctttggtcctggggagacagtcttaacaggagtttcaaaagccagtgctgttctcacagctccccagcagctctgtgaccctggtcattttcctattgttgggattacagaaccaagcggggcactacactcaggagcctggtggtattttcacctcagtcccgagaatatttttctcctttttttggaaattctgacatcttttcccttgtaactcttgcaattttgaagagttatactcatgacatattttatccctaaatagtcctgagaacttcagaaaacccggggtgcacagaaggagctgagaggggtcatcagagtgacttgtgaggacaaaaacagggcaatgggtcaagagtcttgggctccaccaagaacctgaggtgccttacagtaagtgtatcatgcagacatacagcaaggtgtgaacagagcacctgaaaccttgcagagggggctccgaggaaattatcatttgtcagcctttgtttctctaattcctgagtgtatgctctcaccccccaacccaccatcacattacttcagccaatcgtcatgaatgcacttcggctgcctttgtgcagtgtgtgcgtgcatgtgtgtctacgcatgtgtgtgtgtcaaagccaggaacacagaatcactctttggggcctcatcactgggcagccgagcctctggacagtcttcttcggaggtctgtgcaaacttcgggtcagagcagctgcctgtgagtcacgatgggctgtggggcctcaaatcccttcacagccgatctggggcaaaggaaaaagcattcagctttttcattttcataataggaagattttttgcagagcccttatagcccgtgtgggggaatgctttttaaaggtcaaatgtgactgtccctatatttgggtttggaaattcacagactctgattataaatattgctgaagtgcgactgatatgtgcaggtaccagccaattccttgatatgccctcttttgtctatttctttgctatccctcagcccccaagtcccaataggtgttctaaagagtcttgcctcaaacacgtggtcagctcgaagggcttaagggaactagagaactatgagtccttctaccgggaagcaagaccaccaggtgagggctctgtgtccccaggtaccagtgggccacaatacaacatgggagggagatctcgttgctctcgccgtatggtggcctggttgagaagtcgagggtttctgtgtattctctggccctgaatccaaggcaggctggctcccccactttcactggtgccattgggaaaagagagtattttggaaacattgtgtcgggcctgggatgtgtctcctctcacccccacctttctaataatcttcccaagttggctaagaaataataaactattgcttagatgagatgatgatcaagtctctaaggaaatagctcagaaaggtgaagactcttgcctctgtgagctggacatcggttttatacttcgacaatgtggatgtatctttgtctgtatgcatcaccttctctgactcacagtgtgcagtactgagggtgtccatttagtccagaaagtctgcatattgatcccatctctatgacactcattgattcctccatatgttccactttgtcaaagtccaggcataaaaactcccagaagcatgagtcctctccacattcccaggctctttcctaagagattttactaccattcaacacagacaggagttgatttctcagcaagactttgaaagtacattcgagagttctattcatcacctttgaggcaacgtaaattcaccaaactgccctgaagatctgagcaaaggatctccaacagatcagattatccccctggaatgaaggaggaggtccacatgatcttttccgggccagcaagaggattcagaagtccaaggattccgtagatgaaagagagtttcaggattgtgatggttagttcttgtcaacatggctgggttctagcacccagttacttaatccaacactaatctaggtgttacactgaaggtacatctacaaactggttgactctaagtagagggattacccttgataatgtggatgggtctcatccaatcagttgaaggcctcaatggcaaaaactgaagtttcctggagaaaaaaaaaattctgcctcaaaactggagcattgacttctgccagggtttccagcctgctggcctgtcttatgaatttcagacttgccatctcccaccccaccccaccctacaataagccaattccttatcttgtatatatctagatatcatgtatttatatatctagatatcatatatatttatatataatactatcgtgtatgttatatatattatatacacatcatgtatattatatatcatatataatatacatgatatatatacatttcctattggtccttttctctggagaaccctggctgattcaaggaccaacaggaaatttccactctagagagaacttctatcactatagaaacttgaaaacacaaaagaacgtaaaaccaccaaataatgtggtcctttctgctagggtgggcaactcctgctggagttcctggtgcacattaaacctcacaggagcttccctctgagtgttagaagaggggacaggggagaggatggcagaggagtcctgtgattggcttggctatggccttagaacactcttatttgtatatatcatgctaaaatgtactcagttggaacttaagtcctaaacagtgtggggtttatataatattgttattatagtgcagaaataattaaagtgtgtcaagttttgcattttttaaaaatcttctctgagaaatccccgacttttctacaaggatttcataactctaataagaaagccctgtcatgaataaaacctggcccacattgcctcaggaaaagcccagaatgtatttactccacttgattaaaatagaaatatatatattataaaaaagtccatcagataaggaacacggcttgtctcctctcctatcctccacacaaaggtagccaaaactttgcgaatctgtcagaaatgggtttcccctaattaaaagggaaaaggaataaattagaatctggtaagagtaaaaggttttttttaggttgaattcatactgaaaaaaattagaagtacagctagtgtggattcctgagacatgtacccactctctttagactgttgccatctaaggtgcacacgctggatttccacatgctgcaggaattgaagaacctcttagaaacctggtcttcataaacttaaggcttatctgggttagctgcaagagacagcaagagaacccatgcagatctttcatatgctcccatctgactcattccctgtcctcttctccccacgaccattcctgccccaacttggcccagaaaccaaatgtgaattttctatttcccacctcagcactagtccatgccaggacaccagctgacaatttcttggttttattgtcaatagctgtaccatgtgatcaattactgtcttcacttagaacgaagccagagcccaagaatatttatattctaccaatacgtgcctgttacaagagaaggaaatatgagttattaagtttaactttttatgtgaattcagagtttaacaatggaaatatgtacaaagaagctttaaatgaagtatttaccaacattccttatacatgtcaggcactaggctacatgggataatgattaataataaaatgatttttaaatgaaaaaaaaaaaaaaaaaaaccagggaaatggagaggagaaaggaactagaggacacctctttccaccaggaagtggaccaggcttggccaaactacaaacagaccagcaaggagttcctacttgctacacaggagggctctaacatgcagaatgctttcgaggattaaacaaaatctcatgtattaagtgctgacgcagtgagatgcctctatctccacactcaataaccaggagttgtattatattattataatcagttcaaaaagaactatgcagacagatttcaatggaaagtaatattacaactaataagagtgaagaatacaattaatgcttcctcagtgttgagcagtgatctgctcatgttgattcatttaaatactcacgacagtcctgtgagatattatcgcatcaatatccctgtcttacacagacaaggaaactgaggttaaggaactttcacaaggtcacacagctaccagatggtggagacgggatgtgaacagggcatcctggctccacagtttgcttgtttaaaacacactgtcctaatccaactcctgttagagagagaagtaatcagtgcaaattttttccttctgaaaacattttgtcagggtctatggtgacttagagcacttagtacgatgcttattgagagcagacactcgacgaggctttttattgtgggcttactctgtttttaaggcaaggagcttctctatttcaagattttttcactatgtgccttcatttcttcctatcgggtactttttttttccacttttgaaatcttccttaataaacatgtgtgcttaaaaaaaatcttctaagttctattcctctttcagagcacacacaaatgctatctcccttgtaagtcaggatcctttggtccacaatgactccctccttgggacgtctaaacacacatgagtaaggtcatgttgatcctggttgagtcttcacagtcttgttcttcacacacctacttccccatcactgagctcgccggcctggcacagatccgggtatcagtgggaaaatggtggaaatggggtagaaagggctaaggtttacacacaagagagggggaaaaacagaagggaaaaagtaagggggagacctggggaaggacaatggagaatgagggttatagactttagggtggctgatgcgggagccgaatggagaacaaaataatgaggcagtatcttatgaagtgaattttctataattacttcaatgttctttgaaaaatgcagagaaaaactagaaccgctttcaattactttcagctgctgaaatgtttgggtgtgacatcacgttgtggcagggacacatggacttctggctttattcaggttacatctccagggctcatccagaatcaggtatacttcttgaccatactactcatttgggacttagctatctccttcgcaactaaatgaggacacttgaggaagctggctggtaatcttatggtcacctgcactgtctcaagtagtgtaggaaaaacagttctggaagatctgaagtagagttcgttacttcatagctgtgtgactttagggaagtcactgaacctctctgagcctcactcatatctatctataagaatatctacctataagacaatacatgggaaagtgcattggcaaccattaagtgctacataaatgttaccaccgcttagtgccttgcagggactcattaaaatcttgttgattgatcgactgattaattaactccagccagcttccttaaaagtgtcctcatttagttgagaaagagatagctatggaagtcaatgacatccaagaaaatccactcggcttgacagcagcctcattcaagggacttttaggtttataaatgtacttgcaaacaaacctctttctgttgctcaatgactagctttggttgggatgatgagatctgccagaagtaatgagactgtcattttggctacctgtacatttgaggatgaaagaggcttgattccagaaatccaaatgaagaagttagggatgccaacctccaggccatctctggacacacagtaggcatatagaacaacactgaggattggattgagtcttaaatccagcaatccccctctatcactgagtatgatggactgcctggtaagattttcatgaaacatctcagagattatatggcctcataaaaacaaaaatgacttgaagttgaacagagttgaagcgaatgaaacttcaaactaaatttttattgaaattctccccattgtcagacgatattttcaatgttcatttccctgcctcagcccattttgccatagaaacttggatgttttcattgaacagcagccagtgaacactggactgaaggggcacactataaatttggaaaaataaataaatgcttcagaacttccacttgaaaaccacagctaaaaatgaaatcaaatctgacccaccccttttcttttaaattgtgggaacagactcagtctgcctcaatctttaagcacatataaaatttaatattaatataagcaccttggagatcaatgcatggcctggtctaaagcaattgtggagcctttgactcaagcagcaaggtttggacgacttgaaccagaagatagcatccttcctatgccatgttccttaataaacatgtgtgcttaaaaaataaaaagggaagaaaaattggtttatgggcatagagagaataattcactccaaattgctcctttgatgaatgtggacaaaaagaataaaatttgtcacctagctaatattaccatcaatattttgtccagctacattccttccaatttaaaaacagttcaatatcccttttaccttcaagtagcagcacttaataaacagtgatggatggtttttatttttgttcgcatttcagtcttccctgctttggtacaaggggactattttgcttgggggaaatgtagatcttccatctttcgtccattgacatgcacgcctcaaggaaagacggccatatttaattcataacgcccatcggctacacaaacatacaacttcccatcaattaggcaacacagagatgttgttaaaaatcaatgagcttattattaaatatatttttttcatgtagcaataatagttattgctgcactattgttattactgcaatgtcagctgtttaggcagctttcagagagtttgattggctttgatcttgctagcaaggcattctatgaaacaagggatctgggtgaggcttccctgctctgtcttctgccatattgagaagccaccaggagaagggggaaaatgtatgatgtagtggaacaaaccttggactggaggcagaagacctgggttctagtcccagaactgcacataactagctgtgcgaccttaggtaagtccttcctccattctaagccttagtttcctcatttataaaaatgagaggtttatgataagtgatcattaggacccctccattctaaattttcagactcttcaaccatttttttaactaggaaaggaaacaggttgaaattgatgcaattcagcaactctcaattgttcctcatcaaaagtctcttgattaaaaaaaaaaaaaagaacgggcagcgtacgggatgctactgaatctggagcagacattaaattgatccaaaacccaaatatgctcctatttgtgttttcatcctcgttgtgtgtttattaaaaataattttgatattttgacacttaccactacggcagaagcctcctgcctacaaacagagatgttaaaactgtgccagcacatgcaaaggttaaaaacaacattgcacagattttggcaactacatcatatgctgtctggccgcagctgatctgaactgagtcccccgtaattacaggagaaggtggaacaggtttgccgctaattggaaaattctgcaaatggcagcactgaagtaaattgacagtcgttagaatattagcaaaatgagagtactgattagtaaaaagctcagaagcagactttttttttttactgccagaatctactggcaaaattgataataaaagctgaacttaataataacagctgttatttgacctggtaatattttttttaatctgttgctgttcccagaccaataacacataaagaaggtctgtatccactgttgcaaaattatttgaataccaaaaggtatattcaaactcagtgaaggcaaactgtgcttaaaggggcagcccatcagtagcacgttctgatggaagtgcattcactggaaacgttgtgagttgttttgttttctcccccttccaacaggtctcgtaggcatgctggagcgttcgcgtgtcctttttagaactgggcctggattctatttccagtttgctttaaatctgtgactgctaaaaatgtcaaagttaacttatttttcattttaaagtggacaggaaggaaagtaggacattgctggactctgaaccatctatcagcgctgagctgttgatggtatttttcagtcactgcatgcagagaaatacagatgggaaagcattaagaatggacatattaattagacatgctgccacgaatctacggaaaagggaccgtagcttcaccacacagacttccaccttatggggacacacaggaatatgccctaaagacttccattttgggaactctgatccacagctggtgggagtataaattagttcaatctttctggctgtatggcgatatagatcaaaagtcttaaaaatgcatacagcctttgaccccgcaattctattttaaggatttgtccaaaaaaagagtcatggatatacccaaagctttatctacaaaagatgttccttgcagcattgtttataataaatacgatggtggaaaacaaatttgtccccaaatggataattgactatgatatacaaagaaatactacataattatttaaattatgttatagaataacatctaataataccaagagatagtctagtataaaaaaatacgaaacagtaaacataagattatcacatttttgtttaaatacagagagagataagagacaaaactggaataattaccaattatttctgagcggtaagttactgggccattttcattttatttgtccatattttctaaattttctaaaatgaccatacattgtttgggtcagaagaaaatacataaattaattttaaagataaaatctctctagagggttttggttgttttaagtaaaaattcaatctgtggcaatgggaaggaaagtctgcattcctgaatggtgtgctggcttcttgacttaaagcttcactgccttacatgatggaagtgcacctccctttgagggaaaaagaatggtcagctaagagcaaatcttaggactccaggtgaaggaccaggctgctgcttattgttgacttcatgtgcatacacacacacacacacacacacacacacacacacacacacacacacacacaccaatcttgtttttgatatctgttctctgaaaacataggtcagcaatacttcaggcctttagaaagacggatttccctttatgacttttgacttcatcctctgataattctgctattttattttgcccttattgtggtacccacaacctcatttattctgaaacactgcaggaagacatcattgccgttttcaaattttgtctctccaccagtcatttggaagggaagagagttggaagcacacgaatccaaattcagcccatggactcacaaaatagactctgtccatgtcgtatcacaagtcgagtttactgctaatagaggcggtcctgctgcatagggccctattcaccggtctctgcatgctcaaccaaagtgacacaatgtgcatggctggagctcgcacgacactccctgtacttgaacatcggccaggaagttgagtgagagtgtgacacttcagaggtgccttagagcacacgtacgtttgccggggcaatgacgtatgcatcccgtatcccatcaggtctgctttttgaaaaaatccttattaatatcctacggcgccattgccaaaaacacaaaatcccaaaggcaaatcccctacgttctagcactgccagaactagtaccaccaggctttgctcagggactgcgaactgccgcagttgcttctagcaaggagcaccaagcccaccccattagcttcagccacaggaccaagcgacttgcaagctgtttctcgccaggagtgtgggtgggcagcgggcaggatcccaacgcgacaactagactcaattgactgtaacccagaaattttttttaagtggcttttttggatggtggtacccaaggccccccatccttcattcttcctaacagttatgcatcaggaaaacaaagcgatggagggggaagtgggggtgttgctgcagccagttggtgccaaatacagttaaggatggagagggaggtgggattggaaagggggggaaaagcaagtcactttcaatcaagtgtcacacctttaaatagtggttaaatctttgcattatgcagctcatccctttacaacatggggttcccttagagaattccctgtttacactgggaattcctccagggccgcatcaataaagctgaacagatgtcagggtggaatgccagcggcagtggctgttgtcaggggtactggggagggaggcacagaacaatgagaaacggcatctgctacacaaagcccttgcgcgtgggtcaggttctgccagtgtgtagggattccaccctaccctttgtctgggcacattgcctttcttgtttctcaatgacaagggttgacacatgtcacccggccctatcaggagtgttatttgtttgccacttgcatatgcaccagtgttcctgaccttccccgcatctctgctgaatgcacccagcaaagctgaaactctccagccctgccccaatctatgatttcattatgcactttgagtcgaaagtgggatgtagatgtccttctttttaattaaaaacatgattgatgagatttaactgacagtaggaaatgcaatttaaatattccttaaagaggcactaaccctgtttgtgtggcaaggcttgcgtggctttccaaagttgcgaccggtgggagaaaggaaattaaaataaaagcccgttcaagtccgctcggctgtggaagggtggtaacgttagacagaaattgcagccgtgtaaccagaaacttctgcgcattaggagccgatgtgaagtgttgctcaggaatggcagtgttcagtgtggttagaggcagcagaggagtagagaagagtatgctatgaaatcatgtggaagcaaaacaggctaattcaccacatttttaaagcaacaatctgatcccaaaagacattatactaaaactctccctgctctgcaaaagtggttttgctcctcactgctgtattgctgaatttatctttggctcctctattgagctttccttaaactgtccttttaaaatttccattataagaaaagtccttagcacccccgatgctccaggacgtgggctgcagttctaaggcaaacaggaaagcaggcaccactttttataaaggccttctcagatttgttcccttagtgactgctaaattattatgggaaattatgtgagccacaggatatagcaatatccaaaccatgggaaccccaaattgtaataatcagaggcaggagtaagtttttctaatgaccaggactttgcactggtattttcaatctagaaatattggatgaagttgagtattagtctgtaccataacagtataacttaaatgccaacaacaatagcagtttaaattttattatagaactagatctctgttctctttcttagtatcatttacaagagggtttcgttgttgttgttgttttgttttgggatgttatgtcttccatggaagtagttattttctgagaaatgataactgtgaatttaaaaaaggttaatactttcctaaaagtatatataagaatagccttgtctacactctggaggcttactaaaagtatcatcttcatctgtgtttcatgcctaaagattttattctagaatttcaaaatcccttaaaaagcaacagataccacacacagtatagttcttctccacttaattcctattaaagaccgataaaaagaaaagcttttattgaaatgcttgggttagaggaaacgggattacaattggagctgatttttggtaagtatttaactagcaaaggttaattagaattgtaacaatgagatgtaagagaacacattctgatcgattgattaatgagatgtcagaaggtataagaatccacctttgggagaaatattaaaaatgaaatgtgtttgcaaagccatgatgtcttttctcttcatttattaacacaagaagcaaccgtggatgtttttccatgggtaacaatgtacagaaaattacgatctccaagttggccaaaagcagcaccaacatgttacccaagtctctaccatccaaaaatgtccccgacacccatacaagggaacaaagtttctagaagaggccaaactctcagcagccctccctgtagtgactttctatctcccctctattctctctgcattatatattcagattaatttaatgaatgactcatttcaaaatcctaggcttaaaattattaccatagaacattataaaatgcctattctggatttattgtttcatcaatctggtatcaatttcactattgacatgggcgatggggcgggggagagggtactgtacacgtttttccttcctcatttgactacactggtaagcaaacagatcttcctatttgtggcatagatgttctttgtcacaataaaccacagtatattatgtttatatatgtccttcaagcatgtcacaacagtttggcattctgagtggctctaccactgtgtacattaaatagtcatgtagttacattaaacagtggggagttcacacttcacaagcacttggtgttttaaaacagatgtgggctgtctgttgtcagactccagtgaaaaagcttagaagagacttggtgggaacataatcttcaaatagctgagggctccccaaattttccacccaagttcgctttacctccatactacagagtgtgggggtgaaaaagatgatgggaaaagaaagagaaaaaaaggaagaaaaaaagcagtaacttttatgtcttatagtacagagatctgaaaaaaaggattcagaattcggaatagtttgtggcatggaatattttgagcagggtgggctcgctggggtgtcgtgggatttactgacaggagaatttttgacagttgatggacagatgaattccgtcatggaagcgttagtggaaagcagcaaggccagatggaaactcacagcttgtctttaatattaattttcttttttttcaagagatcagaattccctaattccctaaaatgtttcaatgcatcttgaggtattatttttcagatgcctttctccacctattcttagtaagaatgttcctttgtgttaatgttatttttcctctcttactttgaaaaaaaaaaagcctagttttttttttgtctttcagtttttttcttgctctagttggacagctgttaaaattcttccttcatttacagccaatatagaagacaaataccttaaccgtgtaagatactaagtctaaatatgagaaatacatctgaaacaatcgtgactttgagctatgatcattgacagaaatcatgataagattttctttgtgccttaatgaaaggcataattcttcatgctttcataaggatggaagggaccactgtttttagggtgtccgtcttccgggcagtaagaaggaagtcaaatactctgctcagggatgcagtaaaaagaaccctggactaagactccagggctggattctagtcttggctctgctgaatggtgggtcacaagtccctgtgatgtggggggcctcaatttcattacttggaaaatatggctggtattgggagaaggacaggggttcctaagtcacctgcacacctctctctctaggatgctacaaaatcttccaaagcacaaagctcaccattcacgtcaaggagtcaaggactgttgctcttcttcctcttacagctgagcttcccagagacctgggaacccctccatggacagttaggaaatgggacagtctctcccttttccctgttgttctacacaaacttcactactgtgcatttttctatgtggtaacttcatgctcaagacaaaaatcaaaaactaaaaaatcagcaaccaaggatgatattccatatcctatccaaacaaagctcaaattctgcaaacttttccattctgtgatcttcttttcttagttcctttcttttacatcactagatttacttgagttgagaacattgctttaaaacttagagatatttcttctatgtttacatataatctattttcctgacattgtttcaagcttaatggaaaaaacttaacatgtgacagcttttcctagagtttcctgacacatcactctggttacatattgggtctccgtgtgcgtgtgtatgtgtgtgtgttttgcatttgtgtttgcgtccgtgtgtgtttgtgtgtgcactagtgtgattgtgagtcagtctgggtcagcccaaaaaaccttttacaattaatgtaatgaaaacatttggctaaacagaagactctaaaacaaagcaatgaattgtgcttattggtaaaatggaacaggggcttctctgcataagttcagagactatttctgtgtggctcaggagggttaagaaacaacctcaaacccctacagctccaagttcccatcatactctaatgtgtccctctatgtgaccagggacaaatcacttaacttttgttctttctccttatctgtgaatcagggaaagaataattaacaaagagaggagtttgagataaagctgattactgattgctttggagtgttcacagttccagagaacagaaatgagggccagtaggtaggatttaccagggagcagatctgattcaatatgagaaaaacctgtgaaagtatgatactgctcaaaatcaaaacagactgccttgttaggcatgatttccccatcatgataaagaacccattgtcaagggtgccataaagagaatttttgcatgacttagtaggctggagcaaatgatatctaagccccttccaatatattatacacctgttgattataaacacatagctagccaatagggtatttcacaaaaacacttggcaatatcatgatgaaagaatagactattagaactggaagagaccttaaggaaaaagagatacgggcagcccctacattctactaaagctagtggcagaaccagggttgctatgacttatgtttgaagagtattttacacaacagtttttcatatacctcttctgagcctcacagtagtcttctgaggtaggaattactagctgcgcattttactgatgcagaaaccaaggacagggagttgacgtgacttgcctatatccccatagatagcaagtggaagagtcaaggctggaactcagggcagaccccatgcaggagacttgttcctttgacacttttctttccaggatctctgaatagttctcacttagtcttagttatttcctgccacatcccagagatatgtaacattattagccatagaggttcatcagttaccagagatagaaagcaacctctgtgatcatttccttccatcttcattttaccaaaaaataaaaatgaaaaaattaaaaaaaaaaataaaaaaaaaaccacaaaaccaaggcttggagcagtcatcttcttagtgggccatccaaaatgaaaactttgatttctgcttgattcctcaaagatcttaaataggcaacccacccacttgatctggcaaataatgatttaaaccaggtgaatgcaagaatgatttcattcattgcattttccatgtgcctcttgagggaaggcatgtggaatatgtatatacagagacagacccccagccaccagtgcctcccccttcccccaaaacacggtagactagtaaatgtttgctagctatttgcaaggctgacagcagggattatttttcccatgtgccaaacaacttcatcctagaggaaatatttcactctggcaagatttaataacaattataaggatcctttttattgatagggcactctatgtctaaaacatattttcatgcattgggagtatgacatcaaatctcatgagtatggagagtggaaggcaactaatggcagcagtagtggctactcctctgcagtccctggggcctccccacccccaagccccaaagtgattgctgctcccccatcttttttttttttcgagacagggtcttgctctgctgcccaggctggagtgcagtggagcaatcttggttcactgcaacctccgcctcccgggttcaagtgattctcctgcctcagcctcctgagtagctgggattacaggtgcctgccaccatgcctggctaatttttgtatttttagtagagacagggttttgccacgttcgtcaggctggtctcgaactcctggcctcaagtgatctgcccacctcggcctcccaaagcgctgcgattacaggcgtgagccactatgcccagctgtgctctccctcctttctgctcatctttcccgtctgactctttttggggaatgggatgatagtaccacagattagcaaaggagtccagaaaagaaggtgcaatgggaaccatgactcctcctccatctgagcccctagtctgtgccctaagctacggaggagtgtgaaagacacgcagactgaccagaagggttcctcagcagtcctggaccactggctgctgtcagagagcccgacccacacccatacctgcccctacaggtgctgctcctcctcctcccctgctatataaaacctcctgctctcgctaattcattatttatgacaccctgataaacacgtggaaatgcaatgtggatgttcaaagggaaccattcccattcctaagatggcccagggttctcgtccattttagtccatgctgtggcttaataatggatcacttcttcagtcaacaaacaattacttgagtatctattacctgaagcactgtgctagaggctggaaatagaaaaccatgttcccgtcctcagggaactccctgtccagtgagcatgaacactgggggaaaattgtaagaggatgatgtactgagtccctagacagaggtgagcacagagagcaccggaaacacgcagggggaagcacaagccccatctgggaacatgcaatggttctcacatgccttcccattggaaaactagacatttaaaatctacctccagcaacctgtattctttaaggttttttattggtacaaatgtatggagtacatgtgcaattctatcagatgtacataatgcatagtgatcaagtcagtgtatttagggcacttagagtgtccacactgctcctcccagcaaagagaaagtcttcaggctgcagagtcctggaactacattgttttccttctccctttgctgtgagcagcattccaccagtacttgggattttcacagccttttacagtcattagtaaatggacacaatgtccccttggggcctatcccccttatggagaggctccatggagattaactgctgtcttaggtcactggggcagagtctaaccccagccccctcctcaggcggctttagagtgacatatatggcaaagtcattctggcaacaaaaactgaaaggcttgtctaactcgacttcagcctaaattggagattctgcacatatctcgtttccttgacagtaaagtgaggagtttggagtggccaaggtgcagagcagctgtgaaaaccggaacagccttcgttcctgcgggctcgcctacctccccagctagggcctcctccttccttggcaccatagagcttaatgagaattttccacgctcttctgctgttcacaggcctctttgcagatttttgcatggaatgaactacaggacatgtcactgatgagtgcgtggtgcatggtctacctcagtgcagtggtaacctcctggagctcaggatttccctccgtgaaacctatgtgaaaactagagcttattctaatgcgaaagttcccagggctcttctcccttcaagcctgagcacattgtctcaactctgcagggtctgaattgagtgaatagttaaatacttgtttctcctatggaacaaaattgttaaactagaagaaacttcagaggccacctagttgaaacatctcatttaaaacaaggccaggcgggatggctcatgcctgtaatctcagggttttgggaggccaaggtggaaggattgcttgaggccaagagttggagaccagcctgggcaacatagcaagacataacccctgtctctacacaaaaaaaaaaaaaaaaaaaaaagaaagaaagaaagagaaagaaaaaaatttagtcgggcatgctgatgcatacctgtagttccagctacttgggaggctgagacaggagaatctcttgaacccaggagtttgaggctacagtaagttatgatcatgccactgcactccagtctggacaacagagctagaccctgtctctcaaaaaaaaatttttttaaataaatgtttaaaacctgagggttcctgactcctagttctatgtccttttctctataccaccctgctagcacagaatcttgtacctggttcaccctcagaaaacatggtgactgctttagttccagggaccttccccatgggttaggtaaaactcctcgtcccttaaaacggcaactgtggaggttagctggggagccttgacaaccccagaaaaatacagttctccccagtataattctcagctgaaacatcaaaacactatcaaaggggcttactttgatttggaacgtcattttcctccctcccattttttttgttggaaatacatagagccgaataagataccagataatccccaagactgccctgatagcttgaggcctcacaaatgtctgtcagctttcagccagagggagaaaacctaggtgagaacagggtcccagttgtgtcccagactcgtggtctccaaccatccccggaaatgggctcttatctgaacagatgagctttatgaaagaggaaatctccatttcaaaaagtcaactccttatagttttctatttaagttatgctaagcacttgtgtatggctgatatttggtactctacggagataagagaaaaagcatagggcagggttccagctctggaaggagctacgagctaatggaaggaaaagacatagatgatagcaagctagaaatgaactcatatcctaaagtttataaacatctctttataacctagcattccaccaaagtgatctccctcatctctagacttgtaagagcatctcttacttacatctcccttcagacggccattgtcttgcctggtgagccagctcatcccttgggggcctcagtcttcactcccctgataagactagaagtttttgcaggcagaggtcaatgtatacggtttgaaatccctttggcatctagcacaggactttctacatggtaggcattcaaataaatatatatttgaaaattgtatagtctataatattatagaatatatacacaattatttatatattgaatatattacaatattaatacagtctataaattatattgcatataatctacaatatacattatataattatatatgatattaacatataattacatattgtatattatataatatataaattatattatgtataattatatatacatatgattatatgtacacaataacaattatattgtatatataattatatattatattgtgtatataattatacatgtatatgtatttatatacacacttatatagacatacacatatatacacatatggtgatttaattattacatgcagttgtatacacagttatggagtcagtggtatctgataagtggcctctgataagacaggataccagtgttcaggactgctcttgacaaagttgtttaaccctctgggctttagatttttcaaaagtaaaacaaagcaatggactagattttaaggccaaagggtttgatgcctgctcttattccatgggacaattattcaagcgtgaaaagattgttctgttgccccccccgccccaccccagactcctatgttccaagcttcttcaggccttgtgacctgagctacagttcctgtcacctgacttcatagcctgcatgattccaactgctcccccaatttttcagtattcttctgctatatcccccaagttgaactcaatacctgtattttatttcacatgagtttctattaagctatatctcccccattctatatttatatagtactatagttcagaccagaaaatttctagcatttcttcccctctgcaactccgtgggtagctgggctaagggaacccaggcaaagatgcctcccttgtctgcattttttctatatttttttctctggctcttggcctgaatgaagcatcttgcatcacctggttagagaagtaaaaagagcctccctaggtttgctcaatactgagggtgtctcttgtcccaagtaccgatacatgggaggaatggcatcattcacacagaaccaactatttctttcttcctctttctgtagacctcttctgcttggtctgtttggtttcgggggtacaatgagagcctgtggaatttgtttctgataatgcaatcctttgaatgtccctgaataataggtctgtcactgaaattatgaaaagaaaatgcagagttggagggaaggtggttctgattccagctctgttaaatttttactgctgctggagggtggctaaattgatcagcagagacagaatttatatttttggagctttagaagcactcaggactcctaaacctattgaaacggtctttcattctaaaggtgggagaactttttactattaataaagaatgctgaagtctggtttcagaatgagcaaggagttggaactggaaggactctccagggtggcagaacagctaccacctaggcagtctgcctgtcggagcaacaggaagttatcccagactacagccacttctctcactgcctggcgtgatggggaaatgccactgtcagaagtaatcatttctgataatgagttcttcaacttctagaatctcccgttaaagctctaaactcacttagaacagccaaatctcctatgcctttctcatcaatcactgtatgtggaatgaggcaataactaagaagaaaatcactttgggagtggggcatgggactgtgcacacagataagcaggccaaggagtgtgcatgggaaagagaccagcatgcaaacaccatgggagcaagacctataccttcttcataacggtatctctaatgcctagcatggtatcttaccccagacctaaatatgcttgctgagagtgaagtgactgagaagaaaatggaaaagtaccaaagacctccaagttttcccagcagtcatctggggtggcaggtgaggggcaattgtcactaatggaaaatatgtattcttctggactctgcagagatgtcatcatgtttatccttctcttccctccttgcaccttatctccattacccaaaccagctcctactcctaaactatcctcattgaatgacaacaccctctttgaccacctgtgcatcacgggagaaacctagacggcagcccagacaactccctctgcctccctttcatatccagtcaaatcctgctgattcaacttcaaaatctctttcaaaatcctcccctagtctcaacccctgctgctactgtctttgttcaggcctccatcatttctttttgtttttcaataaatgtattccatctatctgaggcttacaacatgatattataggacacactaagatggtaaaatggttactgtagtggagagggttagtctatcatctcacagagttacgtttttttgtgactagcacagctaaattctacttatttaacaaatatccctaatacaataatacaatttgattcactttagtcctcacacagctcttcttgcctgaattactgataatggtcccctagtttttttgtcctgcctccaggctgtctccccgatgctcaacccatgacccactgatatggtttagctgtgtctccacccaaatctcatcttgaattgtagcttccataatcctcatgtgtcatggaagggaccaggtgggaggtaattcaattatgggggtgggtttttcccatgatgttcgcatgatagtgagtaaatctcatgatggttttgtaaaggagagttcccctgcacatgctttcttccctgctgacatgtaagatgtgactttgctcctcctttgtcttctgccatgattgtgaggcctccctagccgtgtgtaacggtgagtcaattaaacctctttcctttacaaattacgcagtctcaggcatgtctttattagcagtgtgagaacagactaatacacgcatgctgtagccctagtcaaagggaagttcaatcaggtcacacttccatgtacagactttcagttcttgaccactcacatccaacacaactgcatttagaccagcatccatacacctttgcttggcctaggagtcccttgatggtctggcccctgccagcctctgcagcctcagtgttctgcatacccttaagtgcaccctattggaagtgttgcaacacgacacactccccttctttcttgcacatgcacaaggagaatatgttccttccccctgggctgctgttcctttcttccctgcccaggtaacccttcttcatcttcacccagtctgggcatcaaccactctggaaaattacccaggattctactttttgcccaggcagaaatagaagcccttcttataaattcggggcagaccttgataaacaatgaccttctgttttgtcatttttggttccttgtctgtttccctagctgcagagcagaagacaatgacacacaactttatccctggagcagggtttgatacatggaagatgcataataaacgtgtcctaaggccacgcacgatgccagaagtttcctccaaaaggcttaggtggccaagcattcattcattcattcattcattcatagagtcattctataggcctcctgtacattggacataggatctcatcaggggctaatccctaaggaacaagtttctaaaatgacttggttgttccttggcctgtcttgaagaaaccaaaaatgacaaggtgcaccgtctttcctgccgcatacctccaccccagcgcaagggctctgtggatgaatgaaaactctaacttgttatttctctggagagcaggcctcatttctctggggaagcaaaccagttctatggctttgagcttaggtgatgcctctccttttccagatgcccctcagatccaaaggaagcagaatagctccttgcttcctcttccccagttacagtgcctggtgagggatgggcccagagtcccactctaattataccctatttgactaggaaatggaattcctgatcggattcctaaatctccaagtgatgcgacatttataactacattaaaaaggaaatgcgctttgctgtgtgccttcactcaagataattgcacagtggtgacactgttgaggggcctgaggcccttcccgaaatgacagaacagaaccatgactcataaagtaaaggaaacagtggttccctccttgagcccctgaacacaagggaaataaatggagccttaactgaaagatgaatatatctcacagaactcccgggtttgggaactctgggagctccacagtctaatcctacgttgactctggctgcctcagcttttccttatctctgcaaaatgaggccagcaagggtgtggctttaatccaaactctaactatggttgcagacccctgggcggctgtgcgttactgcgtgtgagtcatccaggaatccaaatacacgccaaaaatcatgggctgaaaaaataataggtcttgcacagatatactcttctactattcaaatgtttgcagtcatcatcatcaccaccatcatcatcaataccatttattgaatgcctaccatatgccaagcacttctcaaatactatctacacattaacttgtttaatccttgtaactaccccatgaggttcataatcattattgtttctattttatggatgagaaaattggggtgcagagaggtcaggtaaacttgcccaaggttacacagctagaaagaagtggagctacaattcgagccaggcaatctgccttcagcacgttctgtaactgctacgtcatgctgtcttccccttttcagcgaatggttactaaaagtacccccataatcacattggaagtttgatcattttttaaaaattttgttatatttaacataggtcctcttttggtttggaaaaaaccaaaccactcaaggattaaccattcattaactactaattgggctagataaaaagtttacaagaggtgcgccctgataaaacatcctttctaccaatgctcaaaagtcgcccaccaaaaatcccttccatgagtttgaagttggtcctctccatgaggtccttttaaaatgcaagtgtccctaagaagggcaataaaagaagacattagtaccttagtatgaatgaggtttccaaatcattccttcattatcaggaaaaaaacaaagtaaggacatgagaaaaaaatagtattgaaagttgagggagggtggtcatgggagtgaaggaaaagaaggagagacaggtgccctgaaaagaatggaaggtgaccacttggggaggcagtcaggaaagtcaaaaataaacttggcctacttcacagttttgcctcgagctggcctgcaggcattcatcagtaccacacaggatgacagttttggtgaaatgttttaaatcaggtaagggctaaattgttatttctagcaatattaacctcatcacctttagaaatgaaaactgtaccaacaagcacgaggccaaggagatctgggattctacttgaggaagacaacactggcagcgcttgtcagtctcagtctagaaccgtattaatgaacatcatccgaagaccagcttctataaaccatggccaccttaatcagagcatctgaaacgaggtgccccactgagctgtttcctcctttaatcactcactgatgaataacagaatgttcgctagattacattacttttgcaaagacctctcttcttttaagctctttcagcaggctctcaaattccatattttcctaaaacaagatggctaccattactgatgcctacctcatattagatttacacacttttattaaaagtaatggaaatgtacaatgaaattggacttgtctctcaattccggtaaaaggctagaaagcacaagtgaagtatttgcttaaagaacgcatctgcaatgcaggggccctcagaatctaaatgcttccatgctcctgaaagttcctggctgctgaggcagatacccaggccgccactggccactgccttgagaatctcatccagtcgcatcaaagaggggacaaagggaaccattgctgcacctaagtgtggttgcacaggactaagatttactggagcctgactaaaaacaaaaagattgggtctccttcaaggaggaatgggttaaagtctgttaaactactgacccagggtcaaaggtttcccctagttgttctgtctcaggcatggaaccatgatctttgggtttgggcaaactttagaccatcttttcatcccttggtgcttcaaattgtaccataaatgcataattcacaggccagtaaagctgttaactaatgagttaaatcctctacagttttaacacaaattgatattaaaaaaaaaggaagcagagttttaaaaataagtacaattcaaaatgaaatgaagataaaagggcttctcctcctcctttttcatgagctgataccccagccaaggacaaagtaatgtttatagattttaaaggataaaaaataaaatctctgtatagctttctccccaaatgaaactcaaaaatagatgctgcttccctaatccttctgatttgaaaattatttggcatttttagaaattaatttttccaggcaattaaattagccagtaatttgatatcaccatcttatttcattatagagaacacatgctgaaatgacacacaacctcattttcatgtattatttttgcaaatttagtactcataaataggtgttggatcgacagtgccagcaactagaatcttccctgctggctagacgggagcctgaggagtggttatgtgagctggagcccaggcctgtcccagctgagattaccagctgggagagcaaaaccaagtcccacaacgtacagtccttttttctctgctccagaatgctagttggcccacccaattgaacatgataaatggtggcaccactggatggaatccaccccctcacttcccaatggccacctggtattttcatgatggctctgtccaaataatttttaaatactttccaagtcatccaactcagtgctccaacccttttagacaaagaggactctctgagaacctggaaattcacttgggaagggagagaatacacacacttagctagggcaaagatgagagagtttttagttctctgtagctaagggtatattgttaaattctaccaaggaaagaatgaggttgaagatgtcttttggctccatatgttcccaggaagaagggaaggcaccaagcattccccctattttatagacaggtatggaaaagcacagaaaggaaaagcagtgacttcaagactgtatgctaagagaaacaagcaaggtcaagatgaacattcagaattcgtcggaaatcatttttcattaatcatttattaaagattaatattttattaatcattttcaatcatattaatcatttttaaatttgaacatgttgaaaagtgttcaaaggggactctgttaaaaattacacaaaagaccaggtacactggctcacacctgtaattccaaccctgtggaaggccaaggcaggaggattgcttgaggccaggagttccaggccagcctgggcaacagagtgagaccgtgtatctacaaaaaaaaattatttaattagccatgcatggtggcttgtgactgcagtcccaactactcaggagactgaggcaagaggatcgcttaagctcacgagttggaggctagagtgatccatgattggccactgtgctccactctgggtaacagagcaagactctagtatgttcacatgcctgttggcctactgtaattatttacacatttttattttttgttggcctattgtaattattttattattttatctatttataaattatttattcatttatatagtatgcattttaaataaaaataatgtataaataaaataattacagtaggccaacagaaatgtgatccagaactgtccagggtgaacaggaacatgtactcaccctgtctacatggggattttgcgaagtggccaggcagtcattaggtaaggagctattacaaatcacttcaccttctggctcatgcccaacctgccctgctcactccttttcacagactttgctaatctcccccctacacttcatgtctagatatcctccccaatcagcccttcatctatgcaagttttatgctctatttcaaacccaagtgaatgtgcatctctcccacagggctctttctgccaactccaaatcattctacttttcccactttctgaattttcttagtatctattgtacatatcaaataacatagctttgaactatagaatgaggctttggggtttttttttcctctacttattctataagtattgggggttcttttcccaattaggcttgaaacttatgaaagtctgagatatttcttgtacttctttcccatcctcttctttcccatcacaccttattcaggatgttagaacagaaaaacaaacaaacttcacagagaccatttggtccagttacagatcaagaagctcatctccaaaagaaaggggccttccctaagaccaatagctctaacacagcctggagtaggggcccctgttctgtgcctccatgagaccatgtgtgcttcacagctctgcatacaccactgtggcatttcttgaccatggcgagtggactgtaatgcctcgtttacttagctgttcattcaccatattggaaagccctggaggacaggagctctgctggattgatcaccatgtcttcaatggctggcacacaacagacactcagtaaatgttggttgaatgaacgattaaaggaatgaatggaaacatgattttccttaaggtggtcatataggcttttattgcatttaattgcatttccaagcatttaaattaaagaagagagagaataagctcctcctcagagaagtcataggaaatggatggagtggttgattcctggcttctgctttgcctcccagaatgggtggtggaacccatttccattgatcttccagtcccataccgcagaggaaaaaagacactgaatgcagtcagggcagctgattcgggatctgacccttcactgagtctctgtgtcaccatcagagacagtgtcacctaagacactgtgcttagggcttcagattccccatcagcaataagagaaggctggccccaaaggctgtggagactccttctggctccagtgcctattggctccaaagcccactcactgagcacccctccaggtgaatgacagtccctagttagggcaacatcacacagagctggacactcaaatcctccatcgtcagagatcagcggcttagtagacagagcctctggttctcccttcggctgctaggaaactgagcctcccagcagcacattaggttgcatattaaacagatgggatgcagatttgagacctgttaaaggttgggctttccttttttttataggctgctgtcaaggtgtgttagtatctctttatttaaacaagctccttagtcttggttacacagtgcagagactcgggaaaaaaagtgagtagaataaataatctatcatgctagcaacataattataagaacatatgttagctcgaactagctatattctagtcatattaagggtatgtgtgggagagagaaggatggcaggagtgtctcaaaatagttcaggcggagtaagagtgatatcgggccacctggaaacccaaactgctttcctggagcctccattctggcatccacagcatcccagagggctgcccgttggtggcttcctgctgctaaatgcaccacctgagtctggagagccacagggcaccttgccgctctgctcagcggccccaccttcgcgcgcagggagatgagcccattcctacttcgttgggtgcatctctgccaggtgcagagagcacaggtccaaagagaaagacccccagaggtcaagggcaatgggtcttggctttcacaaatgcctcaagctctgaggcactaagaaaaacaaaattcacatattttgagggccttcagtgaagggaatcaatgcggaggaaacgtcgtgttgcaccaccgtttcccacatgcttatttggattgtactcaccgttcaaggctcttctcagggaaagtgcccccactcacttccagcaccgcccccgccccttcccccagggagccttcagaactctcatcgacatccctcccttggcacagaaagccctcgcggctccccaagcctgtttgggtcccctggttatttgctgctatggcaccccgcagtgctggaggacatggatactcagtgcacttttaattataccatggctggcttccccgaatggattgctgcctctgcgaaggtaggagctgtgcctaatttgttcaccacagtgactgcggctggctagggacctggggtctgtgctgcgaggactcagacgcagcgcgccaggttgtgcagccgctgtaaacaaggcgcccaggggctgcacgctctgggaggatcagagggttcgaggagggcacggagcgcatccccagaacagtgtgggctgcggcagacacaagaaaccagggctgatcacagcgacaagagcataccactctagcgccacactccccggagcctggctgggcccacagacaaggacccttggggacggggcttccctccaaaggtgctgggagttgctgccaggcattaaacagagggtcaagtttgtgctctaggaagttaattctgggggtataagaagggcctagaggcaagaaaccagcttggaagccattctattcaccaaggtgagaggaaggccctaaattcaggtgggggccttgagaattagaggagagggagaagctccagaggtattttgtgggtagcattatgtattttgtgagactctaagcattttagaggggcctaaaaattaataacctaatagagattttaccactataaaaaatgtatatactcctgtgtccaggcacataaaaaaaatgaaaacggatttttctaaagatagtcttaaaagactgttattttaacacattttctatacttttatatagcttattgatgtctttaaaaggagaagaaataaaggatttgaaggaaggaaaaaggagagagcttggggagtcatatgtttatgctcccaatagcttgagccacaagccatgtttaggggcacttgtccctaactgcagttgtgtctaggtttgccccttgaaagtctcattctggcttacatttaagtgctaccttctgtgtttggtgaatataagttaatattttggatgagactaccttctgtgtttgggaatatagcttgtccccaaggaaacactgctctcccaagaactgaggtgttagtcaggtacaggggctcacacctgtaagcccagcttaaggataagagttcaaaaccagcctgggcaatggagcaagaccccatctttattttttaaaaaaaggaattggagtatgaatgtaccttttgtccccccaaatatgtgtggtaccaaatgggcaggtgtgtaggtctgcacagggatggggagggagagcattattccttttttaaaaaaattgctggccgggttcagtggcttatgcctgtaatcccagcactttgggaggctgaggcgggcagatcacctgaggtcgggagttcgagaccagcctgaccaacatggagaaaccccgtctctactaaaaatacaaaattagctgggtgtggtggcacatgcctgtaatcccagctactctggagaatcccttgaacctgggaggtggaggttgcagtgagccgagatcgcatcattgtactccagcctgggcaacaagagcgaaactccttctcaaaaaaaaaaaaaattattattattataatgaagtataaatttaaggtgcacaagtactcttgttacatggatatattgcagagtgggaagtctgggcttttagtgtagccatcatctcaatagtgtaccttgtatcattgtatgcattaagtaatttctcatccctcgccctctcccaccctcccaaatctccaatgactattattacatactctatgtccatgtgtacaagttatttaactcccatttataagtgagaacatgttgtatttctgacccagaatcagcagagaaagtagatggacagggacagggccctacagggcaggtggggccgttgtgatggcgacattttaatattcacccaccatccactcctcacctaattttcattattcagcgctaacatttaaacagtattctctcccaagatgacacacaatcagaactgaaggtaatccagactattatatcaacagcattgatatagaaaacatgacatttgtgcttgtccccaaggaaacaccgctcatctagggaaggaagccagattgacgcattacccaccattgtgcatctaccaatatccatactgacagatcgagaatatctggcaagggccacatttattgctgtgccttacattgcttttaaaaccccagaatgtcagaagtgtacatccaaaagcacccacttttactgtttgaaagaaggatggctgtggaaattttatgtccagactgccttccagcctcgagacacctcagctctttgctaaaactgccatttcccccccaagagcaaatctttctttcccacagataatgaagatcatgatgctttgcatatgataatacagggtattctgcaaagtactttcatacacatgtcttcacaagagtttcagcaaacaaacaaaggctctaaaatacactgggtaggtgttagtcttattgggaaaatgacaaattgacatctaaggatggtaaagtgacttgggccagcatcccatctgctagttcagggttacagaccttttcccctcccccgcaggccacctcttcaccacttcccactgcctcccatccccactgcctgtggagcaacagtgtttggaatgggtcccttgagttatttaactacatccaaggctggacaagaaatagaggggaccagccaggtgcagtggctcatgcctgtaatcccagcaagctgggagcccaaggtgagaggattgcttgaacccaggagttcaagaccagcctaggcaacatagcaagaccctatctctacaaaaataaaaataaaaattagccgggtgtggtggcacgcacctgtagtcccagctacttgggaggttgagatgaaaggatcacttgagcccaggagttcaagatcgtggtgaaccatgattgcatgaccaaggtacaactggagaggccaatttcagcctgttagttaccaaataagatggtgtttaaacataggattgccctgtgatgcacagaccatctttagccagtgagcagtgtaactgagccctgccagatgggagtgaggaaggcaggcagaacgcaaaaggcaagcttccttgcacagccaagggagagggctcatgtgtgcaaggggtcagatctctttgctgcatgtcttctcatgagcctcccagacagataacaaacccgcacaaagatttaaactctccagaggcatcccggttatttctatctaaagaggaactgatggctgcagttcctgagcagattccaaacagagactcatacctggattctgcctgcccagagcctcccaacacaaacagcccagtctgctcagagcaggaaaaggtaaaagtaaataaacgtggtcttaatctctccaatagattggaacaatctgaaccaacctgtaatttcatccagacatgcagggagaataatttttaaagttttgctaaacataaatgcacctccactcattatgatttccccggcatttttttttttcttcctgcccctttctccatctgcactttattcaatgaacacatctgcattccttctctctctttttttggccagaaactttatacaaccttatcactgacacctctctgcagtttcaaattccagctttgtgccaaatccccatttcctgctgcttaatttccattcatttactcttgtttttgcttcttctgccattcccagcatggaccaactccagcccagcttcttctaattttttaaggaaggttccctgttgagtgctattggaatctgagcctccactccatgccagtgacgggccattgtttatactacctaacgacagttgccagtagaacggcggctttccctttctttatttccctccctgagtgtttacactaaggcccaggagaacttttccccacatatggtgacccagtaggtctagttttattatgactttggtagaatctgaagtagcctctttccatttctttttgacaggaaaaataaaatcaagtctggaagctttgtttacccagctctaagtgccaccatcagcctcagacaaagctgaacggctgctgtcaggacgagggctttgggaacctcataaggttaggctgagccaaaggacaatgatgcagaccccgaggggaggatgagctgaggctggacttttcgtaaagtggaggaatggccattccatttttctggtgctcaggaatttcttcaatatgttgggttgttctacaaagccaggagcaaacataaggttgtttttctggcttctaaggagagacaatgcttgcttaaagtttttttgagatagactgtctctctgtcacccaggctggagtgcagtggcgtgatctcagctcactgcaacttctgcctcccagtttcaagtgattctcctgcctcagcctcctgagtagctgggattacaggcgcccaccaccatgcctggctaatttttgtattttttgtagagataggatttcaccaagttcgtcaggctggtcttgaactcctgacctcaggtgatccacctgcctcagcctcccaaagtgctgggattacaggcatgagccacaaggcctggcctaagatatctttttataagcaaatgaattgtggtgtaaaaatgtaacggccatttttcttcccatagtgggactgattctcatttgttgtttgggggaggttttgatttgggttttctttttcctaaatccatagctcagcagccagctgtgtcagcactgtagccattttgccgcaaacatctttgccccaggtcctgatgtgtctacccccaagttctgttccttaccctttccctctgggtttcattgcctagaattacaactccagagtctcatgcaaaacatggcatccaaaatggaagggcttacagtcaggaatgtggaggtctgagaagcaaatggcacccaacagcaagaaaagaaaatcatcccaaatacttaaaggactaggtagtatggtcccattctatggatgagacaccaacagctcaggggcatatccaagggtaaacctagaccagaataaacacaaataacccaattcccagcctattcacctttcctgggttctggtcgggtgaactttgagtgtgtctatttccctaaagcagtgatcttcatgtatctaaggaagggaggagcagggagaacttcactggccacccagagaaaatgaacacccactctttgttactccagttttagggatctctgagtcaggataggcagactccacccttgctcaaagatgaaagagtcctcaacatcatggccttacttgagttcctgagtgaaggaaagtctattgtcagatgggcagtctatttctaaagaaatgggattcctatcgaagaaccaattatgccctcagggccagcggtggctctcttcacagagctcagcacagagcccctaaaagcaagcttgtaaaacacgtagtactgcccatcatcccaaccatgggaggcagagcaaaaccactgccttggaaaacaacctttatgtacacatgaacaaatagccagaataaatatctatcagatctcctcgggatattgaatgagggattaaaattgtagaggcgccattggttacatcaacaatcaatatgggccccagtgaaaatgttccagttactatacatttcctgctttgctgggggcacatgtagatgcgtctcacactagatgaattaatgaaagatgaaatggcccaccaaaactgttgtgcatattcaagagcctttggtctttgatgctgtttcgtctctagagcatcatcaaaaagcctcaagagatggagctgttggggtggtcagaattatttctcacagcgacaaatcactgctaaattctttagaaaaccagattataatatgtaattaatgaagtccacttaaaggtatcttccttatctctttcaattcccctgtgttagactgttaaacctgtgggtgagaataatgctactgatataaatgcacacacgtaaatataaaaatgtgtttatccatatgtgcataaaagtgttaagtatgtgtgtattcataagtacctatattgatcaatataaaaacacaccccaaggctctgctttcattatatgtatggcacatggtggggaagagctgtgtattgtaccctatattgcattgcacatatgcgtgaaaaagaaaaatcgcagaaagtaacaagtaaaaaccaaaaagacagtgtgtgaaacaagctagaatgatatagtacatatcatttatattattctttctacttttatgtgtcttaaaattttctataacagaaggcttaaaatttaaatgtaaaagataggaattccatttccctggtataattaaaataaattttacaatttgctatttatgggatatttcaaccaatctcactcacttcaaatatgaggttttttgttttttgttttgagacggagtctcactctgtcgcccagactggagtgcagtggcgcgatcttggctcactgcaacctctgcctcccaagttcaagcaattacctgcctcactctcctgagtaggtgggactacaggcacccgccaccacgccctgctaatttttgtatttttagtagggatagcgtttcaccatcttggccaggctggtcttgaactcttgaccttatgatccacccacctcggcctcccaaagtgctgggattacaggtatgaactaccgcgcccagccctaatgtgaggtgttaagaaaaaaatcaaataatcaccaacttggagatgactcctcataatgctggttttcctaaactgtgaatttttctttaacagaaatgaaatatgttttggaaggggctcaagcgccaggggcacctacagtagaaaatgaaccaaatagaggtatctattccccttcaggtggaaaattcatttgcccattattcttatcaagttaaaagctcattgttaataaaattatctttctggagattacagcttctccaaactgtccttaaaaaatgtgtaagccaaaccatattttccacagttgtagcatgtccttctaccctttgcccaactgacctgggcataaggaatacatatttattagagtagcctaatttaaacacaaataacaaggagggggccagggaggaacgtgcattctgaatgccacgtacacgtcttacttgttttcttctccattcaaacatgtattttgagttcatgtgttcctgtgcatgaagagtaaaacaaaaaagcaaaaagggggtctaaatcttgattccatatcctgtccaagacccatttccttgaggattgtaagcaatatgagtgcagggtgttggtagttgtggttctctgacacacctggttttgtgtggaccccagttgcaaagagggctgtcttggaaaacaagttcatcccagaataacaagcccctccagaagcaagaagtatcagccctgatgtaaatatgcggggtcccaagagatggcttccaacttccaactattatccagacatatctgaatctagcctctgaacctaaagccatccccctattacgggtaacaccacacactttcttggatccacacagcctgaccaaaattaaaaaaaaaaaaaatcctgcaagtgtgtgacatcaacatgttttcctcagctaacaggcttctctattcaccagcagccaaaaattttaagtggctcttaaacaaagacagtccaagcgaagaataatgatgtcaaacccaagccatagttgtggtgtgaacacaaaatctacaggacccaagttaaaaatgatttacagacagtttgatcagagtcagatgtgacatggtgtcttactggagacaagccagtggctatcaatccaaatcccctacaacaagttatgtcattagtcagaatcaatacattatggagacaattttctcttttgtctcttggcccagggaattttccaagttgagtttcatcaccagattgcaaggtcctcgcattacaaagtggctgacaggaatcacaaccactaactccctcatgtgctcttctggaggggcaggggaaaagtttaaggaataaatccaattagacatgggagtctccaaataacaagtccaaggcctttgttgtcaggtttatgttgaacttgtgtatcccgttcctgttgttgatatccctttcaagggcatcagtttggactctcagatatggaagcaacacagtgaagaggtccttagtgccaggtccaccccaggaattacctggtcaccttggcttagccaaggcacagggaaaatgactcattgataatggccaacttctagcctttggcctctgcatctcatttttctcctccctgataccagacagccccatttagctgcaagatcttcatgtacctgccctcttctttaatccctaaagaatggccatggcatttttaacataaaggcagttctgtaaaattcttcccgagtgccagcaggtgcacaatacttctttccatcattaatgctctcaaggatatttttgcaacaaagccccggtgctgtccttgtaggaccttccaaagccctcttacggggtgtgatagagaacaggaatgaaaacattcaaaaattaaacaaaatgagggtctcattttcctactgccatcaagcccttccaaaagaaaaattctctattcactcccatgtgcgactacaatgcaggatatttttccagctcactggtacttcataaacaccatttgttgtcatgtggttaaattaaaactgaggatatcaaacatcaaacagtatgttaatgtcaagtatgcttgaataaatagtaagagttcaattgaatggaatatgtggattgctagctaattaagcaagaagcaggtgtgaaaaaaatctaatttaggcaattttttataattaataatgtttacttgtagtacccttctaatggggctctagtttagcctcttgtgaattgctaggagtttactccagtattttaaaattataattgaatggagaattttatgggatatcaggtttccttgctgctgatgaagcactgtctatatagaaggctcctaacagtactttgtatcaataggatcaattagcaaatgatcctagcaattaaaacttaaaacacacacaggcataccccgcacctaaaggttctcttgcacaccccagtacaaggggagggagaagtgaatttggatgaaccaatttgaataagaatatcatactcaaacaatcattggataggaatgacgagagcttcggtgagtgtctgcaaagagcagcaacagagaacattctgttgggattagaaacaaaaaattaagatcatatctaaactgtcctggcaaattgcacacaaccaatcaattaatccaagtatacgtttaggattggttttctttccaaaaagccaaatggaaggagaggaggagaaaatgaccacagatgtgaaaacagacctggaatatttcatggacgtgacatatccaccacatttaattaaaaaaagaatgtatgagaacaatgtatccttctcaatctgggtcgagggaacaaaacaggactggattagataggacaactgtaatctctagagacagttccatgtttaatgggagcgccacatgtttgatatgtagggaagtaagtgggtgtcctggacacggtccactattcatcataataccacagccctgttcattcccagagaggagagttaaaaccatgaaaccatatgtagaatattaaaaatcatttaacattaaaatgcacattatgaaggcatgcactttggacaaggctacagtccaagagctctgagaaatctccagttcagtagataattgttgtaaaggtaaactgagttatctatatgtacctacacatgcggatgtttgcacacaggcgcatgcatgcacacacagagggactgtcatagaagcttagtcctcatctcttcaatgctgcctttcatcactctgttttccttactgatttctgtagtgaggtcaatatcaataattgatggagctatgatatctagagcatcagcacattaatttataattaaagatgagaaatatcagttcttctcccaccacccattatttggtattaaaacatatatatacacatatatatttaatacatagcagatattaaattgtttctcaagcagagtcagtaaccttactatattttcatggacttttcattgccactgaattaatcacagccctgcccctaaccacatagaactttatttcccaaaagagcaatgtttactttgctttactttgttggaactcaaagtacctattcagtctataacgattttgtgtaacatattttgttaagcaacattaaaagcgctcactcacagatcttggttagactgctttgcttatatgcagatttggggtgcttttgatctcatctagctcaccaacaagggcaaggctgagtctaaatccactgtgcatggaaatgctaacgactttggagattgagagtcctctatattttctcagttgccaaaaataatatatgaagtgaaaagtgaatgtagcaaacgtaagcatgcactcagggagaaatcctatctgtcaactttcagcaggagatgacagacagcagagatggtaccaactcagactgactgtgggtagtctgatccctgccattccaactaaagacaaaagggtggacaactgctatgaaggccaccagaagacattagggtcccttgctgaaggagacatgcctcacccatgaactcactgtagggccctagagtcacctcttgaggcagtcaccacagctctcccacagtgaaagatggggagggcatttactagaacagtaaacagcagattaagtagagcagagtgaaccccaacaatgtgtacctggccgagggcagcaaagctgcaatttcctctgccagggcatcagcaaagtgcgtcctgccctcggttatcctgactgcagttggcccctgcactctatgaacaaggaatctctcacccaactgatcatttggggcataggttgcaacagtgcaaggtgggagaagttgaagaaaaaaaaggacaggtaacgttcagccatccagccagaggtatgcatttgacccaactgcaggccaggctggctccttctcaaagggcaagagggcttttgctcaaggcctgaggctttagagacaaagcatctaaaggcttagagatgatccatggttttccaagtcagggatgaggctgcctaggcttttggagattttgattcattcacctggcaatttaagaacaggtgtatttggcataagtcgctcaaccctgctcctgaaggaaggaggggtgcagttgcaatgtattgcagggcactgcttttcttcccttcttttcccacaccatcccaagcctgttcctagaagctcctgggactcagaggaaatcactttccggactctaccctcatccacacccttgcaaacagcaatagcatatctacttaggcagaaagaaacggaactgtagatgcaagaaggtaaatgcaatctgagagatttgctgttaactccaaaggggctttattctattacataaagtataggacagaggtttctgaactgtctttatgaacaagcccgagttctttctcaaaatcctaatgagacaatgccttggcccatctcctctttgagttcctcagaaaagactgagcctgatcttcctgccttctgttgcaaaccttcttgccatctgggtgataagagagccagtaaagccaggcagcctgcatacctttctctccaaatccagatagccagcatgctggggtgtatgagaaggcaaggagaaattctccagactaaggtaacaaagctacagccacaacaagctgtggtgcccttcctgccacatggttggccagagattcttttctatagactgtcactagagggcctgcccagacaccatccctgaacatatataaatcctagagccaatgtcaacaatgcatagaagtaaccctggaaaagctgccatggatgctgctacaataaacggagagaaggaagctaatgaataaattcatcatcagagatgatggaatgaaatgcagatgggtctatgtatttgggaaatcaaaactccaactaatggtgcacacagcatgttgctacaggggaactaacatcgggagaggcaggaaaggaaaagatgaaatgtgtttattaaaccattgctaagaacagaggctaaggcaagagcttgaaaatctgtagctaagttttagaagatacaaagaaaaacggagctcttttttgggtagagaattggatccatgtacagatgctcctcaacatacaatggggttatatcccaataaattcaatataaattgaaaatatcacaaatcaaaaatgcatttaatacatccaacctagtgagcatcatagcttattactctaaactaccttgaatgtgtacagaacacttacattagcctatagttgggctaaatcatctaacacaaagcctatgttataataaagtgttgaaaagctcatgtcatttattgaatactgtactgaaagtgaaaaacagcaaagttgtatgggaacttgtatagtttctattgaatgcatatcactttcacaccattgtcaaatcaaaagatcataaatctatgtgtgttgggggcaagggtgaggatgcattgaaggactagtttccttactctgtctccatgaatgcagcaaagagtagcaattcagactgcagctctggagttgtgatgcctaggtttgagtttatgttcctccacttaaaactggggcaaatttcttaatctctcagcctcaggacactcacacgtaaaacaagggtaagaatagaacctgccaaataggagtgtcattgagaagattaaatgaggtttccagtagccaggtaaagcacttactatagtatgtatacttacagaatatatacacacaatatgtactcaagagtttgtagatgcatacaatatgcacttacagtatgcagcttacctgaaagaatcagcagaaaaactttttaaatgtccccaaagtataggctgtagtcagtatttttttctgcacataggtgggctatttaatgaaggacaggacacttcacagctacttaatctcggtgaatcatgatcgagcaattccatttgtggatatctatctccccagaagaactggaagcagggtttgaagagtaatttgtacaatgttcaaagcagtgcgattcaccattgccaaatggtagaagcaacctgaagtgtccatcaacagatgaaaggatagaaaaatatggtataaccatatactggaatagtattcagccttaaaaatgaaggaaattctgacatacgctacaacatggataagccttgaggacattatgctgagtgaaataaaccagttatgaacgaatattgtataatcccactcacatgaggttcatagagcagtcaaattcatagacacagaaagcagaatggtggttgccagtagctggggggaggggaaaatgggagttgttgtttaatgggtacagattgtttgtttgcttcagatggattctcactttgttgcccaggatggagtgctgtggcatgatctcagctcactgcaacctccacccccctgggttcaagtgattttcttgcctcagcctcccagcagctgggattacaggcatacaccaccacacctaatttttgtatttttagtagagacggggtttcactgtgttggccaggctggtcttgaagtcctgacctcaagtgatatgcccgcctaggcctccccaagtgttgggatgacaggcacgagccaccgtgccccgcagagtgtcagttttctaagatgaaagttctgaggctggatgatggtgatggctgcacaataatgtacttagcactactgaactgcacacttaaagatggttaaggtggtaagtgtattttaccacaaataatttttttaaaaaacttaaaatggtaaaaaaaaattttgattgaaaaaaaaaagaatctcagtgaatcacacaatcagaaagtccccttcaaatggagattaatggtaattgatctctggattctctcccccatattggagacaccttttcttaagacatctcaaagtgaaaccccgaaggaggaattgtctaagaagatttaggttcagttctgtgtaatgacaaactccatcaatgagagttaacaaattcctctctgtcccattcatgaattccttccttggtgtctaaaactggctccatttcttgcgcaaagcctaggaatcaggaataaagaattcatcaagccctgagagctagaaagggaagctgagatcaatcacctgtttcagaaaatagaagataatcgagactcttgtctccaggtttctcctgtgcttttgagaacaggagtaaaggcctgctgacgcttctgagttcctccaggtctggactccctcctgggagacaggaagtgcagtacccacatccatggagcacctatcccgggaggacactttctaaactgagatggtaacagggcaaagagtgtgttcaatgagagcgtgtttacttcactagagcccatcttagggcatagtaaatttatcgttgtattatttggaatttccttctcactcatgagtctcctttgaggcagggttgttcaaggctcaggtttggggacagatggatccaggcaccagtttccttatcacccaggctggagggcagtggcgcgatcacagctcactgcagctttgaactcctgggctcaagcaaccctcccacttcagcctcctgagtaactgagactacaggcacatgccaccgtgcctgacagcaatatctgtttcttggggttgtggtgaaaagtcaaaggggcgatgtgtaaggcaggcttagcacagtgcctgatgcatggcaaatgttagccaatattatttactatcctcaccacagagttttggaacagattttatgaccttcatattatcaagaggaaagggccacccagagaagcaagtgacttggttagggtaatgcagtctctctatgtcgttccctctgctggatctattctttctagtctgcttagaaagagaagcatccttctgacccagagaggcagttgcagagggctgcagccaggcagggctgaccacaggctctggtttccagatgaaccaggatgctgctccagattgcttgctgacatccccatcctaggctggtaccaaagcgtaagtgaaagtctgtcccctgctcttccattcgcttcgacaggagccttcatctgctccaccttctgggagcatgtgtcggtctcggagcctggcgctgaagcaggtgcgggcatattttaagctccagcaaataactttaattgagctctccttagacatatgaacccacagagcaattttttttcctcttctaataaaaaaagacccacaacaaaccagatgggtctcagtccctccccaacaccccctccccactcttcaggctcccctaataaatctcttaactctaaagaaattaccttccttgaagtgggtatgttattcggttgcatgactgtacccaagctgcctctgcgggccagaatgtgggtcagaaggatgcagcctgcagaaatgaggcctgctggttctggccaggttggtgcttgcattattgcttgtccataactttctatcaccccttacttccctgtgcctgctcccctcatgctgggtcactcactgctgctgttcttctccctttatgttctggtatctgcaacctccactttatttatttatttcatttatttatttagagacaggattttgctctgtcacccaggctggagtgcagtggcgcgatcacagctcactgcagctttaaactcctgggctcaagcaaccctcccacttcagcctcctgagtaactgagactacaggcacatgccaccatgcctggctaatattttttatgttttctgtagagaagggtctaactatgttgcccaggctagccttgaactcctgggctcaagagatcctcctgcctcagcctcccaaagtgctgggattacaggcatgagccactgcacccagcaaccaccactcttagcagtttcacctcaacaaaaattcccttcttggagtggaccttccaacacacctggctaatgtggaaaaatctagatggaattcctcccaccaaaagccagcttaactccttggcagcgtgtccagaaagagtgatgaaaaaataagccaatacctcctgtcaccaaaataaagttcagagacatcgtgggcaacagagttcagtctcattttgcagatccgtgttctctttaatgccccgtatgaaggtggcagcgggaacaagagggaaacactacagtgtgactggattccagaccccgcccccgaaaaaaagacctcaagaattgcccagggcaagagccaagcaccgcgctctgggttctgatttatgagcgctaaattattggtaggagggcccagaaggagtcgtttacaacagaaattattgcaggcaaatgttggttggtattttaaatcactcactaatattgataggttaatgcttgtcacacttgcttaagggtcacagggaagaaaaaaaaacacaaaactttatctttggcttgttactggctaagtataatgatagatacacctttttgtgtttttttttcctcgagctaagcctgctgtattatttatggttttctgagtcactggctatagcctgcatctggattttaaaaggttgatttgcaaaaaaacaaaaatagggcacccgtctagggaggctggtgggagtctgctctacagctcgagcggcccctccaagaaccctgggctgcaaggctgggcgcctcaggcggccagggccagatggccagggcgcattgttcccctttcggtggtagtcctgctgcggcaaataaagttaaatcaaaaggttagtgctctgcaagggggtggcagagctggctccagctgacaagagacaagcatcctggacagagagtggggactacgtggctgttccccggaatgcaaagggaagagagctagggtgcagaaatcaacagagaggagcatgctgacctggagcggggctttccaggcctcacgtcagacaggctctccctgacaacagcaatcacggatcacaaggtcccctccttcgtagaccccgagggagccaacaattacaatcttggtccacccatgactagggattgagggaggcaccatccctcaccttgggtctgagatgggaagagctgcctcagacttccttcagcaaacagcaccttcctttgggggtggctttggggtggtatattttggagggggatggggtgtggcttgggaggatcaaatgaccctcccctgtcatcagtggaagcaaagtttagaatctggatgggcagcgtaggattacttctaatgggcacataacagcttttaagcctgacacaaaatccttggattatttcatagactgtcagagcaaaaaaaggatttaagagactatggaaacccctgcctcattttacagaccaacaaaagggagtccagagaggaaaagtgatttgctgagggtcacacaggaagatgaggaagccgggacccacgcccaatgttcccgggcactgtgccccaagctcaaagtatacatgagggcgatggtggccgagtgggccacgatgtgtaaaatcacaggcaatataagccgtatttcaaagactaggggagacgatatttcatatgaaaactagcaggtacaatatgcaatacaatgcagtttggctttttttttttttttttgaaaatcacctttttcataaagcacatttgaacttgccttacatttcaaaataagtccctctctccccaactcccacccacccttgtcccactccaagagcgggagctttggtttcctctgcaggttctaccctgggctctagctggactgcacatttttgtattcctttttcattgagtttccaaagcacagtatttacccaggaggcctgcagtttccagggtatggaacacaattaggtgacctgcaaagtgttttttatttacctgagagaaccaggctgtccttaggtgccaactggtctctcaggtaaatatgaacttgggcagacttaaaaaaataaaaataaaaagctaacattaagatatgtattgagggatttttaaactctgattccatccttttagctagatacctttctttcccctgcccagcctcattcccctaaacagaatattactgaagccatttcagtgcctttgatcctgttctaatctggatcatatttacagggcagatcttctgtttcctaccacactggactggcttgaatgcacagttaagcaatatttttgacttccctttgaaaatttaggaggaggtgatatttccaaaggtgtgcaaaaccagcgatgaagcaaacttaactttttaaaaatgcaaactacattttaataaaagttaacttaaaagaaaacaaacaactctcaaatcacatttccatcctcaaatctgtctgctttgttagattgtttttcccccttgaagctagtctgtttttcttttgtttttctttttagttttttgagacagggtcacactctgttgcccaagtggaatgcagtgacaggatcatggcccactgcagcctccacctcctgggctcaaacgatcttcccacctcagcctccctagtagctgggacaacaggtatgcaccaccacaaagggctaatttttgtattatttataaagacagggtctcactatgttgcccaggctgatctcacaaactcctgggagcaagcaattcacccacctcagcctcccgaagtgctgggattacaggtgtgagccaccacacccagcctaagcttttcatttctattagaaaacctatagggctttctgctcatttccagaaaatgtgaggtctgagcaccacatctctatgagaattccaaatggaaacaatgcaaaagattttacagttcttaccaaacacgcaaattttagagtaggaagaggcaggtgagatcatgttgtctgactctgattttacggatgagctcactaagcaccaaggggaagtggcacaggtcacagatggagtgggcaaaaccagaccaggctccaggacccaagactcctcacctggtgctcttgccagcatctcccactgacttcctgtcatcccactgctgatttgagcaacgagtgagttcatcctgctggcctgaccatctccagaaagtaagagtaaatgaaagatttgatccaagtacactgtatctccttgtgctgactatagctgaaacaattgctggagaagtatcccagttatcaaagtgaaaacttctatccttttacctgattgggaaaagctgatttagctatcaattagtgcctagagccagaaaacttgataaaatcttagtttgaacttttaatgtggtgtggactaaacaaaaaactgagttagaattttgctcttcaattaagtgatttaaaatatattttagttagtattttaaaaactatttctgacaatatacaaatatagtaacaataaagacactggaacttggacggcaaaataattatgagtccctgctttccttcctgccaaactccccctgcccccccatcctactgtagccaaaaaaatacagttttccaagaactgcatttttctgacatcctgtgcattttgagatccggggagacttcccattttccacactcagcactttgagggccatcagggtcgaagcaccagtattcccagcagatccctgatagctcatccagaacaatcaagctaccggctgccccgcccctcttgttactaagctgacatcaatttctcaaataagcattaccttcagtggtggtggtgtttctaccagagaaacaaagcaaagagattaatcagagaccacaaagttaaagcagttgcaacctcggctcgaaatcccactcctaaaacaccatacacccaagtcagaaaaaataaaatgaaacttcacatcctggcctcagaagcgcctgttaacccaggaactactgcgctgaaaatcacatcctctgctcagcccgggtgagcagggactacaggggaaaatgaaagaaacgatacatgtttcaaattttacagcagtttaacatcatgcaaaactgaaaaggccttggaggtttcattctcgatgaagtttagttggtacagaatcaactgtctcagtaaaacacaccacaggcacataatgtaatgtagacagacactgaaagcaatatcagattcctttcttatcacttcttcaggataaaattcagatgtacatttttcccggttaaatagtgcgacaggattaagtagacagctaagcctttataagttgaataatatgctttgcaggttattaatatgctgatcatatacgctggctttattaaatgaaatatttgaaatgtacagagcctgatttcattttcagttttaaaaactgtgctataggaaatatttttgtataaacaagattctaagagtctttcatcttttgcttgcctaacccaaacctgcaggattatgttaaatgagtatttatgttcccaagcaacattttaaaaagttttattttcatttctacagtaactctacagtatcctgagaggtaaaaattgacacagtgcacacgattactggggagggttaataggcagaaaattatcccagaatctgaaaattctgtttcagcaaagctgataactggtgatttcagatttgaatttgagcagctgccaaagaaaagttaaaaattacatctaaaggatgaacagctgtggtccaaactatgctgcaatcttaatctttatgaacttcttcgataggattcaaaccaaagccagaaacgtccacagagatcccttctgtagagtcagatttactcatgttcttagtttggggtcttctttaaaataaaataataataaattcaattactatgaaaaccctcctccaatgaaaattaaaaattcaactctcttgcatcatgctttttatgaagatgaattaaaatgtcttcatcgcttttcatagatgtggttgaaattattaaattattattgaatcaaggtcttgaaaccacttgcagtctttttccatgttctttcacatgctgtaatggagatccgtaaaattttgccaatttggaaacaggtccaatagatggttattaagcactgctcgactattaagctttctaacttccataatattttgtagtcccctatagaacccaaactaccattcaccgtctttagagtcactcataacattctgggcaaatccttaggaaaatgacacagagttgggctgagctgccaagacacagtatatttcgactgaggactaataatatttggaaatgatttcctgtatttcttctttacttatttgttaatctgatatagtttccagagtttgcaatgctcatgccttttgtattctaaagagatgaggggctttcttaaaaacaaaacaaaacaaaaatcttctttctctagcctgattctcacttaatgctgaaggtcttttaaaccttctaagtaaacataaatgtgtatacattagggttgcttgtgttggaagaagacaaaaataaagattggccttttcccggtaaacatggactcttaagcctctaaatgatttgccaaacagaatcggataataaagggtttaaactttgccactttggggttaatgtgaaaggcttgtcaacatcagactgtttagacattaaaaggaacgctctgtgcacctccttttaaactccatgttctcttgagttgcagctcccagtgaatttacccagctgtaagtgattccagatgtgcagcagtgacaagcttcagtctcagggtacttattcatttcacattaaaatctcatgttcccaggtctgagctgttatctgactgagatctgattagggaatacagcagaggcatttccaaacccagagcctgccctcattccctggcacggatctctgactatcaggcagctctgtgcaagggagaagtggctcggggtacagtgaagggcagggcggggtttcagagctgtccccttaatacgtgcacatcgcatgctcccagcgggtcaggtacttccccacagtttatctcatttaatcctggacagagcagtagacacttgagcccagctgaacccaattcctctatcaaacacgagcttccttcccccagttaaagggggtagggcctgtgattttgcacattttctacacagcaccccacatgcagaggggtgcttgataaaggcatgaggagtgataattgattttccaagccacaaaaccctcaatcttctctctcgcccccagctatgttctgaccacgatagaagaaggtaagtagaagagcaagaagaggaagaagaagagaaagaaaggaagtcaggagcatgaagaaagcaccttcttcaaacaagctagttatgcctttgttcccggacaaggaagtggtggtcctctctgatctcacccctagcatgaacagggttcattccaagtcagctttgacttccttgcccgaagtgcacatgtacaaatgctattggctgacagtttcttctatgacacgtgtcaaagacacattttcctggctacagaaatataaggtgagttggggactgcagacagagactaagataacatgagtacctgagggaagaaagcaacgtctgtgatgcccacagaagggggataagttagggatcattattatttcattattttcccctctagcctgacttttggtttgacttgagctttactgcaatttttttttcttgaccctatcccgttgtcactttgaagagggagatagcaccacaaacccccagctgatcaactgtggtcacaggctgctggacagccccagaggccatcagtagctcctgtcaccgaaccctcgtcacactggaagccccagaaactatgcattgaatactgcagccccctccccatgtgctccgtctaccccaaaaggaagaagaaagaatcacgcaaaccccagattcaaaatggagaggattaaaaagccagggaagccccaggcccaccttgaggggcctcgggttgggggtaacgtggccgcgccacatggaaggagagcagcggcatttggtttggtggtgggcagattttcttttacgactgctaaatgcctgcctttctccccaagcaattatagtgctgtttcccatcaagatggctgttagctgcggatctccaagttgctgcaaataaatcaggaatgctattggcagctggctgggagagcgaccgagatggtcatcctggttatcccatgatggcgatgaggggcatcgcagcaatggtccaaaccaagctgtttctgggagctaaagaaaacaaggtgcagccctcctgagccccacatgaatgaaagcggaaaggtgcgcttcgccctctggctgcaggttcagaacctgagcacacctaggaaatgggacccccacaacactcaaccccgccatggcatgtgctttgcccaaggaaacataaccaaggcgccttcctccggcacatggagtagtatcaaatgctgtcattgcagttaatcagaagcaacacaaaggggcccttcggtgcacagtggacacaatccatgcggtaatgaaagcttgtaaaagacgatgccaaagacgtgcattatgacatggaaggtaaataaagggtctgacgctgggcggggggcggagtggtgcgggttggttcactctgcagcttgcagtggcttcaggctggaaaacgggctgctcaaaccacgcagcacccttaatcttgtgacacggagggttctccgaataccgtagctcatctgaacacacacccttgtgaaggatccacatagaaaatgatggtgagattcctgtgtggctgcacgaatctctctgctggctctgtcactgtcacacccaaagcccacaaaaccatcccaagttgctgtgtgtcccgcagatgcaaaaagcatttcttccacgacagtgtttgagggtgaaaggagagaaaatgatttgggcaggctgccaggggtatgtggaggccaggtgggccgtgtcctccaagggaactgcacgctgggctaagaaacggtccctgcacgggacgagcaccatgtggcagctgcaaaccctcgccctgcccccggccctcgagtcacattgtgtcatgccacacggcattcggatcaggagatggctgtggcgtgctgcgtaatatttttaaaagcccatttccctgtttaagggggaagcaggtggaacacaggacccctgaagggcagatactctgaaaggccccacaggcaattctccaataaaagagagagcagggctggcatatctcccaaacttacaaattgaccttctctcttgatctgggacttaatgcctccaaaccaaactaattccaaaagtcaccttctcaacttctctgtacaattttttttttaaacaaatgaaagctcaggtacagcctccccttgcagcccttctgacgtccttagccactcaaattaaatctgaatggttcgtctctttttattatacgatgggccatatgtcaccaaaataaaaacccagctgaaatcccagtacagataaagggcatgaaaggctgttccggccacaaaatagagaccctgtttaaatcttattaaacaataacacccacccaaccatcccctcccccttttagcaaaaaaaattcaggaaggaaattgtggttaaatcatctcatagtttggcaaaaacttctacctctgaaaaatgaaaaggaaaaaaaaagcttcattctgtgctggactcacacaggctaataaaaagcaggactgtattgctttgcactgtagctgtcaaattctcagcaatgaaatacagatcctgactctctcattcccttgggtgctaccccctcagaccaccaaaaaacggaaaagcgggggtgggaggggcatcctttaccctctcccattccagagtgaaccttatttgttgctctgttttattttgaatttttgtttcttgacctgaatatctctcttcctgaagagatacaacacgtttccactgttgtaaacacagttaaacgtgtaaggagctgttgaggctgctgctttaaagaactatgattcttccttcttttaaagagagtacacactgacattcagagaagtccagacattgcaacaatggtaagcgtgctgtaaaggaaggaaggaaagaaaagaaaaaagaaagatcaaaaagaaaaaacatttccatttcacaaggtcccccagtggcctccaatgctcctcctccaccatcaaaaattcataagggggatcagcattctttaccgaatggatcccagtggcaccatagaccttgctggggagagaggcaataaatatcgaattatacacctcatgggaagaaagcactgaagactcagcttcaagcccttcacatggtcccagggggagctgctccagactccaggtccagtgcagaaaggaaatgggtcaagtgtgtcaatttctagaccgatgacctttgacttgcctaatgacactgggaggccaccacaaaaaaaaaaaaaaaaaaaaaaaaaagatgccaaatgccttggaggaaagcagtgggggaggggtgtcattgggaacccatgagaaaactgcaaccccagcactgtggtggggggtgacccccttcacccctggagtaactgtgacctgtcctggggaaggtgtaaccagctcagtggtagaaagtccatgaacagagaacttcaactaccacacagttttggttcccagctccaggaatggctttgcttctgcctgaaacttgaagaacatctcgtttgttcctctctaagccttgctcctccctgctctgcccccgaagcctccttcttcaccctccctgatgacccctgatttggctgccaccacctgtgccaaccacgcagtgaggtctcaatgctctgctgccttgcatcactccctttacacatgcatttttttcatctccttgcttctaacttctaagcaacaggagtggcctagaccttggccagattcctgcccccatcccatcttccctcacctagcactgtatcaagagtacgaagtcgatgctctgtgattcctgtcaattgttgcaaggcaaacttccattgccctatccatttcattttggaactggagtatctgggttccaaaatgaaatggatagggcaatggaagtgggaaggaaaagcatgaaccaatgcagtcagacaacatgcacctgcatttcccagtgtaaaaacctgtggaaggcccgatgtggtggctcacgcctatcagtactttgggaaaccgaggtggatcacctgaggtcaggagtttgagaccagcctggccaacgtggcaaaatcccgtctctactaaaaattcaaaaattagccaggagtggtagcaggcacctgtaatcccagctactagggaggctgaggcaggagaatcacttgaacctgggaggcagaggttgcagtgagctaagatggcaccactgcactccagcctgggtgagattgagactccatcttaaaaaaaaaaaaaaaaatctgtgtagttattcatccagcaaaacagtatatggaatagatgcccagttctcctttccttaaatggaaagatctagatgtaaattttcaaaataatctgacagttaaatgcaaattaagggtttcacaattggataatagaataaaattttttgcaaaccaaaggctatctggtagagtctaacatagctcgtggactaagttttacaaaaggtacctagctgcatttgtcacggagggaggtttcctgtgatttcagcccctcgtattatatataaagttgacccaattagagtttggattgggatgggcatttttagttctctgctctcagacacctgggcttcagttcccatttatgcttcaaaaacagttgaagttcttcttttcccatacaccaatgttctgaactccactgccaattctgtgagctattccttcagacatttgctaaatgggaagtggtgagaaaactgcctagaacacccacactgaactgctgattctcccagttcccagaatgctggctgggtgggactgagcctgaacactatgtcagctggagtccacagcacaggccccagccagggagctgtggccccgctccctcatcccttcaccctcctcctcactccttgccccttgaacctccaccaaaaagtaagtggtcatggggagtgaaaggtgaaactcagatcattcccaggggaagagttttaatgtaagactccatgggcaggacactgaaagaaacttctatctaaaaggaggttggagaactgtatgcagatttcattgatctgcatttataccaccttccaaggccattgaagctactctgtggcccctaaccttttaagaatagtaacacaccagtgctgcctgattttcccagcaccttgtctcccctccacctctgagaggtgctgggggaaagttcagggtgatttaaattattttggttttcacactatagaacccaccatgtaattaaacagaaacacaaaagagtgacctatgcaaaaatctgtgctctattattttgtaacatatgtaaacatagtatatacaaatgtgtaattacatatcaatatatctttatatattatgttaaatttataaatttctatgtataaggcttatatttgtcagtaaaataggtacaataatctcaattctctggtaaaaaataagattcaaagcggtccaatgactttctacaaatcacttagctaacctccagtggaaccaggaatcacaaacgcatcccctccgcatgcacgagcacgttcaaatcacagcatttttacaagttaaagacggaactcccatatatcaaaaatagtgtagaaatggtcgcatacattatgtcatatctacccacccaatggaatagtatttcccatttaagaaagatgaagaatctatgaaagcatggaaaatgtgcatcattgagtgtgaaagttaaaataacaccacaaaatcatgtggactcaaacgtgtaaaaatgcgcctgtgaaaaagacggaaggggacacacaaaagcgaaagtaatgatgcaaaagggctgaaagttacagcgacttttttcttcttctatgttccagacttttttgttttgttatttcgttttataatttaaaagaaaaccttaaacagaagttctctgactccaggctcagcgctgcctccaatgagaaagtgtcattcactctcctgccctcatccccagctgtctactgggaactaatttgggactgggttgtgggttcctaacactacccaggaagctggaatgacaggaaaagccaggactccctagttccaatccccagcattcaccccagccggccccagcttcctcagcacaaccccgggctctagctgtgtatagcctctgctcatcaggggcctcgctgcttatgaattatgaaaactcgctgggtgtgcccaccggtgcatatggatcagctgacacccgagtgctgaagacataacaaaggacttcaccgcttggtatcaatgtcgatttaaaaatcaaaagctttgctttgcgaactttatccttccacgtcagtggggcgctatttaaaagataccccaaaataactgttcaatgactgcttcccaaaaaattacaactaagcatttctttagcagtggatagcagcattccctcaacattggccaccctgccatgtgcggggctttctcctttaacagcacatagctgcgggtaccaacgtcaaagacaggaaagagtaaaccaaaaggtgtgtacctttgtgtgattccatgtgtacttgtgtgtaaactagaatccaaataaattatttccggaatgcgaaaccgagaaggagctgggtctcccaaatttgggaagattgtaacaactcaggcatttcacagagcactgtgaaccactgttttactgaaacaatattggctgacttaatgtgagtgtcagattagcacacagttgcatcaactatataattaagagcatatgtaaatatacccccaaaacccaggttttccaacatttacaaggcacagagcctgaaaaaaaatccataagacccattcgcggctgggcgcggtggctcacgcctgtaatccccagcactttgggaagccgaggtgggtggatgacctgaggtcaggagttcgagaacagctggtcaatgtggagaaaccccgtctctaccaaaaatttaaaaattagccaggcctggtggcgcacgcctgcagttccagcgactcgggaggctgagacaggagaattgcttgaaaccgggaggcggaggttgcaatgagccgacagggtgccactgcactccagcctgggcgacagagcaagactccatctcaaaaaaaaaaaagacccatttgcctgattgcacctcagaaacccctgcttctaggtaatgaaatttgcccagtattctttgatatctacattttgggaacagcccaaggtttttgcttccagtggaggccttgagatttttacagagtgagatctgcacagctcagatccacagccacccttcctgggtgttctcaaagatttttatccacccacctcctgaaactgagaaacttctttaaaaactcagcttctgaaaaaaaaaaaaaaaattatggctctacaataagcaaaggaaaaggtatctttcttctgtctccagaagatcttagggaccgtaaactctgctcttaagggagacagggggattgttttatatttgaaaagtgataaaacagaactgagcaaggcatgggctgcaaccaggaagaaccctaccaaactggaaattaaccaggataactcaagcctccaacgtctcaaagccctccagggctccatgcagctagacctcccctcacttctctgccaacaccaagtgtaagagtgccctttagaattggctgggaatttagctgctgccttctctgaaatacccagtggctacatataaaatatacagtgccacagcagatttccttgtacatgatatccacataaaatttccccatcagtaaacccaggtgggaggcctccagacagcaaggcagaaccaacggtctggggaagtagagaggtttccagagtcagcctcgctctaatgacgatgccaggcacatacttgagaacatactttctgaacagaaaaaaaccctatagtgctgccactaaatggctgtgtggccttcggtaagtcacttaacctctctgggtttcagtttcctcctctgtaaaacaaagtgttggaccagatatataacaaaggtcattctcaaatccctgacattcactgaaagattattcatggtccagccaggagaggagaaattgaggtggacaggaattacgggaatcttgctatttaagcaaggaagtgaggccagacacggtcgcttatgcctgtaatcccaacactttgggaggctgaggcaggccgaccgcttgagcccaggagtttaagaccagccttgacaacacagagagaccccccatctctacaaaaaatacaaaaattagctgggcatggtagcatgcgtctgtagtcccagctactggggaggctgatgtgggaggatcacctgatcctagaaagttgaggccgcagtaagttgtgatcacaccactgcacaccagcccgggtgacagagtgaaactctgtctcaaaaaaaaaaaaaaaaaaaaaaaagtacatgaggggttgggaaggtttcatgagcttaatgattacatgtgacatagacttaagatatgcatttatttgtacaacacatatttgttgagcaactattatatgctgggtatacaccatggttcttgccttcttgaagcttatggttcagataacagttgtctctgactgctgggtccactttccttgcctttgttcacgcaatagcccccacctagaatgccctccacctgcttaaattctaccatattcaactcccagctccttcatgaagctttcctgtactattaatgcagtctactctaacttctctctcactgggctgtagtatttacagaagcattgttgaatgtggaatcacatgactttcgaattgctgttaagtgcccccaaactgtcaccctccctagattataaactcccaaagacaggggcagttctgtcatgtccaccacggcaccaaactcaccagtttctcaatatatacaccttgttcgatgcttgactgtgtgaaaatcttggttaaactcagtgggcttgtttactggtcatttgagagttcatttttatgtcaacctttattttgtaaatctttttcaattggattattctactttcctcatatgatacaccaataacaacaactttaaaaaaaaactgactttttagggggatggcacaatactctgtgattcatcaatgtcactaacaatactctgtcagttgtaacagacataggtggagacggttcctaagataaaagctgaatggataagaatagagttgattgtaagccagcatgttccaagatttgtaagcaactgaactctcttgttaaataaaatcatataaagaagcccagtgtggacaaaggctctgccaaaggcaacatggggagcccaggcctccacctggccatgacaccctcacccccatcagctctgtgacacttttctgtaacccatgaggctctgctgagcacaaccccaaagccactggtctagattttaccctggaattaaaaaaaaaaactgataatttgcatctttctcataaaagcagaagaggaagataaggctaaagaagcagaggtgagggtaaggacagaaagagcaagaatattggaatctgacttagcaaagagtcatatttattggatattagttttatatgacttggataatatgatacatatatgaacatcacagatataggaatgtttttatattaaataaaataaaacatgtattgagaccttaactgtgtgctcaaacactggttggtactattatttcccgccattttgcagataaggaaactgaggcacagagaggctcagtagcttgctcaagttcacacagttggtaagcagtatgggagctgaccccaggcagtctccagagtccttctcttcatcactctatggctggctctccaagtcatttacaccttcaaaacacaaccatcgtatcaccttttatgtgctcgacactttacagatttctaagaacttctatgagtggcatcatatccatgcccttcaacaatcatgagtgaggattactgccttggcttttcagctgaggaaactgaagcacacaaagattaagttttatcaagaataatacaatcaaaccagaacccaggtctcctaacttccaggttgaatgcttctgtatcgtgctactcttcttgaacacaaactgcataagaacccacccccattccaatgccctccaaaaggtgttcattgtgctccctagaagcccctgccctcaggggcttcaagcattcatgtgggctccaggtagtagctgtgtgtctgcagacacacaaccacacaggtatatactacagtaatatacaaaactcataatcatcttcattgtcatgtcttgaggagatctaccaatttgctaggttttttatagagactctcataattcactgaattttttcataacataggtgcattccaaggacagcttagtggtgtccaggggtttttcaaaagacctaattcctcaggattgctggttcctcccagcctagcacttcttgtccatggatccatttggccactcactggatagcaggttggggagtgtagatagaagagaaataaagagggtagagcacatactcccaccctggggctcttcacacagttctgagagccctgggctcatcaaagagctgcccacagagccacactgagccagagacaagcagacaagctttgatcttcccaaggctccattagtccctatgtcccagccattagtgagcccctactaatggagaattccccatgcacatgcagaaatattctaggtgatcacacatgcacacatttaaatgagttttataagtccatatacgcaaatatgaatgttgatacatgcattaaggagcatattttaatctgccaaaacttatctctggggtgttaccacattatgcactggggatgagaaacaagggaactaggaggctcatatgatctcagcttcagtcaatgaataaatcatctgctcatatttattgaataacttccatgtagctggcattatgctaagttatagaaatagaaaagtaatgtgatctaatccagccaggaatctacaatctagttgaagagagaattataagggtaacattttacattttgcataatattttctattttacgaaatgctttatcagataccatcctccagcattcacaagacatttgctactaggaccattttgcagataaggaaaaccaaggctcagaattgatttgccccaagtcgcataactaaatagtggaaaagcaagaacttctactcagttctttagactccaaatccacagctctttccaaaaaactatgttcgttctgcaaaacaagactaatacacaaaaactaaactagcaacattgtatcatcctatcatatttaattaattatgtgatatccaaacacaagggacagttgcggtgtagaggaaagaacactggtcttagagtcaggcaacctaggctctgtcacttactgacaaaatatttggctttgcacaaatgccttagcctctttgggcctcagtgttccataaaatgagtctgatagcttccctagaaggttattacaggcataaatgcatgtgagaatgctttagaaacagaaaaggatgaattaaatgtgactcttcaggaatgagtggtgaaatagtaggaagaggcccttctctgctgggtgttgacagataacaaactcataggatgggccaatgccacatcacagcagctttcaccatctcccatgtgacattaaggcaaggttttggcttgcaatacattcaaatctggattataaagatctgtgtcgtagtaaacttgtaaaagggcaagacctcatctaatcccctctaaagatgaaaaaagacatgatttataaagtatgttatttggcataggaagctctgattctttaaataaatatccatgtaaacaaggggtttcagagactatagacattttacatttgtcctcatatgccggaggcgcttgggaatcaacatgattcagatacatgacaacgcaaatggcttgcagacaactctcccacatttacaagtagtttaaatttctgaccctgtctctttccagtatgcctgcaattgaaagacattgtgtattccatgtaaataacaggaagatgggcacatgagtctcccgttccgtaagctaagtggatttggctttctggataagagagccatgggtggccttgctcctatactcaccagtgagtaaacatcagaagcaacagcagcagcaaggcagcctcaccaggaagccttacactgagagctaatggctttcctctctaccagttcacttggcctaggggtcaacttctagagcctaaagctgcattaggattggcttggggattcagtccctagtggctctctcctgtcatctcctcttcccagccttgaaggttgcagtagaaaaggaaacctgagatcaggaagcaagatctaatttgcctgcacgcagtaggtatacaaagacatcttactgaaactccagttttacacagccagtcatgttacataaaaaaatgtccttatacatctgcatgtatataatacagagctatgggttatacacacacacacacacacacacacacacacacataaaatcaatagacacatttctacaccagcacatccttcctctgagtttaaaataccctatttatatgtggattgttatattacataataataagaaaggtctgttaagtcaaaactttacaagatcatatgtaacgttgttttaaacagaaagcttaaaatgagcaatgttcagtataatccaagaaccctcctcaatgtcaatctgggatgaaaaattaaaagccagatttagccagcttggggccaagcactcatgttcagattctacaactgtgctgtaagaaaacagcctgtctctcttatcccaacaaaatctactagctccagcacagaatccaagtcctctgtcctttcaagccaagaaaaggggcagtccttaccaccacaatggaccagcctggaaatattaaattgactcagcccatgtcttcttagatacaacttaacaactctgagtttacaaaactcagccaaatggcatcaggcttcagcataaacttttgctaactagcccacatagttcccatatgctacgcgatgttgtttgagccaactcagtaccttataattataaacacacgtctttcagctcttctgtgtattcttcccaggcagaacggaaatatgtcacttaaattagcacttggagtacagagtggatgccaaatttgggttagcacaaacagggtaaataaagcagcaccaaattaaaatggtaaaataaacttctttatgctccagtggaaactgctaagtcctagctgaatggcagctaatgggtctgggaaaaggatatccctcaaactgtagctcttggcttttgaatacagttttctcatccaaggatctcgaagcaatttcttgcaaaactcgagtagtgtgaaaaaaataaaaaaaaaggagatgctgtttcttttgcaaactcttctgccatcatttttcctcagcattctcttccaataatactgggaaagtttgtatttttatccttatttaattcatggggagagggagagattttaggggaataaatgaaggcacgtaggtgggggttcatttggcaaaagccaaggagcaagaatatatcacagaaatccaatcacaataagcctcacagagagaagcctttgtgcctattctgtctaatcagaaccaccacctattgaggcccattgtatgccaggaactgaactggaagacttttatagatggtctcactttcttcccaccacaatcctgtgagttggaaattatcacctccattttactcatgcattctgaaggtgttctgggaacaaagactggaggggtctggaaatgggggcagaaaatagaggactgccgggtgcagtggctcatgcctgtaacctcagcactttgggaggtcgaggcgggcagatcacttgaggtcaggagtttgagaccagcctggccaacatggtgaaactccatctctactaaaaatagaaaaattagccacgcatggtggcgggcacctgtaatctcagctacttgggaggctgaggaaggagaatcgcttgtacccaggaggcagaggttgtagtgagccgagatcgcacaactgcactccagcctgagcaacaagagtgagactctgtctcaaaaaaataagtaagggacagcaaaaacaaaagggagagttcacaaccacttcattcatgatgacaaacactgagcagcaatagactagctaagcaaattgtggcagagtcattcaacagaataccacttggcaatgaaaaaggaacaactgtggatacaggtatcaatatgatgaatctttttttgtttgttttttgtttttagacagagtctcactctgtcactcaggctagagtgcagtggtgcaatttaggctcactgcaacctccacctcccgagttcaagtgattctcctaccttggcctgacaggtgaaaccctgtctctgctaaaaatacagaaaattagctgggcatggtggcaggcgcctgtaatgccagctgaagctgaggcagaagaattgcttgaatctgggaggcagaggttacaatgagccacgatcgcgccattgcactccagcctgggcaacagcgtgagactctgtctcaaaaaaaaaaaaaaaaaaaaaaaagcaaaaggcagtgtataggccaagaccagatgcaagccaggagtggagaaagtcttttccaaacaccagctcagtggagctgaactaggaactgcacaacgtgtctcatggttgtcatgccacctccatttggtggtgcgcttggtcagaacctagattaagagagtggagaggattcaagtgtcgtttgtattaaagccacagacccatcaggcccaaaggcaacagaacttctttaaatcaaaaatttcatatttaaggccaggcatggtgggtggctcactcctgtaatcccagcactttcggaggccaaggcaggcaaattgcttgagctcaggagttcgagaccagcctgggcaacatggtgagacttcatcgctacaaaaaaatacaaaaattagcagggcttggtggcacatgcctgtggtcccagctacttaggaggctgaggtgggaggatagcttgagcccacggagcagaggttgcagtgagctatcaccccactgcactccagcctaggcgacaagaatgaggccttgtctcaaaaaaaaaaaaaatcatatttggaaattaaaagaatatcacaggcaaaaggggagctgtgctggtcaatgtgtggaaagggacccagctttgtgtgctgagttgatccaccacctttccctgcccccacctccttcagtgacataataattccaaagtccctacggacaccaaaggctctcaatacactgggaaagtggaaaatccactcccctgaaaaacagaagatgaggtcattattcttccactaagtggtggcctcaagcaagtcaatgaagtgcccagaaccttagttttcttagctctgtctgcactgtcaaccacctttggataagaggtgcaaatgagacatcactgaataaatttttaagcactttgcaaatgcccagctattaggactcctcttccctataaattggccacatctgttagcagacttccagttcaaaatgaccttctgctaacagcccctatgcagtttcccctgcctcttactacaagacctagagaggcaacataaaggaaagatgttcatagcaacactgaaaattacttctgaaatgcatctcaatttcattcactgctttccatctatactgccaccctcctggtctgagccatgcccatttcctttttatgtctttgtaagagccaccttgactgctctcccagttgcatttctgctacactctgtctcaagctactttccagttcattcttcacgcagcaaccgggggaaactgcaaccactgtgtggaatgcaagcttgagatgctccctagaacacagaggggtgagacaaaggaatgtaatagaagaagcattaaaaaatgtaatacagtaatatttttctgagctgaagaaatgtatgcaaattttaaatgtccattatgtcttttgggggggtgggggaagcttattatgttccaggaataatcgatgaaaatctaggtgtacccaaactttcctatctcaacattaaatgctagaatatactgggcaatgtctaaatagttagaaaaggatatggcctaagagttttacagccactattttgaaaaggaagacctcagagaaagactctaaggtattcaaagtgtcagaaaacataggacctatataccctgcttgacaagattattaaagatgcaatccaacattagaaaaataaagaaaaattaaaagcttaaaatgcagatatcataatatgaaggggactagtgaggaacactaaaaccaatcaaaatagaggtaagcctaataatcaacataaatatgactataaaacttacatattaaaaataatgatcaaaatagaagatacacgaaaacttgatacaattatattagtctggatatagtagccaaatttattatttaaaaagaccaagaaatggcaacagaagaaaagaataggaatgatgtaaggcaaaattttataaaactattgtgccaaacagaaataggacttccacttatgactgacactaatagaaatataggctaaaaaaacttcttgaaaacaatttaatagtaatattaaagaagatatacattctattctactgtaaagacacttggacatgtatgttcaccgcaacactattcacaatagcaaagacatcagatcaacttagatgccccaaaatggtgaactggataaggaaaaggtggtacatatacactatggaatactatgcagccatgaaaaaagaacaaaatcatgtcttttgcaacaatgtggatacagctggaggccattattctaagtgaattaacacaggagcagaaaaccaaatgctgcatgttctcacttataagtgggagctaaacactgagtacacatggacacaaataagggaacaacagacattgggactacttgagggtggagggtaggcaaaaaaaactacctatgtgtgctatgttcactacctggatgacagaataatttatacaccaaaccccagcaatatgcaatttacccatgtaacaaatgtgcacatgcaccctctgaacttaaaataaaagttagaaggaaaaaaattaaataaataaatacctggaataaaatttcaattccttgtaatgaaaaaaaaattttttttaaagaagatatatacagtaggcgtggtggctcacacctgtaatcccagcactttgggaggttgaggtgggcagatcacgtgaggtcaggagttcgagaccagcctgaccaacatggagaaaccccatctctactaaaaatacaaacattagccaggcgtggtggtgcatgcctgtaatcccagctacttgggaggctgaggcaggagaatcgcttgaatttggaagacggaggttgcagtgagctgagatcgcaccacagcacttgagcctgggcaacaagagtgaaactctgcctcaaaaaatagaaataaaaataaaaatgatatatacattccaacatatgttaaaagatttaaagcaaacatatttatacaaaaatacaacagatgaaagaaataaaaacaataaaaaatggaagacagatccatgagcaaaaatatctgctataataataaacgtaaataagttaagctctcgcattaaaaaggaattgaataaaatattcatgttagatcgaaaatatgtatgctatttaaaagaacactcagatgttccataactccatgaatttatgaaaaatcactgaagtgcacactgaaaatgaatgaattttatggtatgtaaactacacctcaataaactgtttttaaaaaacacccaaataaaaaattatatgtaaaaagatgtataagggattatgagaaaaacataaaccaaaattaagcagaggtcacaaaactaatagtaggcgatataaagttaaaagtaaaaaaatgcattaactgtgtaaaaaagctaattttataataataaaaagagctaacatttatattaataatacatagtaatcataaatataaataaattacatcaaaatatataaattttaaagtattagaattccaaagaaaaattggcagaaaaataattatagctagagattttaacgtatcctccttgctgtttggcaaataaaatagactaaaaaataaacaaggtagggccaggtacaatggatcatgcctgtgatcccaacactttgggaagccaaagcctgagactggcagatcacttgagctgaggagttcgagaccagtttgggcaacatggcaaaaccccatctctaccaaaaagtaaaacaattggccaggcatggtcccacgcctgtcatctactgggaaggctgcagtgggaggatggcttgagcccaggaggtgaaggttgcagtgagccaagatcatgccactgtactctaagcctgggcaacagagtgagaccctgtctcaaaaaaaaaaaaaaaaatgaagaaggttgaagaagatgtgaaaaacattaatgaaattttttccagcatcccaaaaggcaaaaattgttcaaatcactttttctaaccaaactgaataatttaaggtaatctcttaaattttaacaaattaacaaatcagtcacttaaaaatcagaactgcaaattgagtacttacaaaaaatgattatcagaaaaaaaattactgaaactcatgaaaaatcatggccaaaactgcacacagaggaaaatgcatagcccaaagtgctttgttttaaaaaaataagaaaagaaaaactaaaaaataaactaagaattaaatcaaagaaacttaaaagtgaaataaacccacagaaagcagaataatggaattaacaaagattaaagtagaccataattaagcagaattgacaataaaattaaataatttaaatataaactggaaaaacttctgccaaggataagaggaaagatggtaagagaatgagagaaaaagagaacacaaaggcaagtacctcattagtaatgaaaaacattcagaatttacagttaaagtggagatttttttaaattgtgaagaatactacgtataatcatgtgctaataagtataaaaatgttgactaaatccactatttttagggaaatactaaatttcagaataaaactttttcaagatcttgcaacaattttcataaaactaaaagagttttattaagcagcctatgagcaaaaaaacaaaaagcacaggaggtcatggagatgggtcaccatgcaatcctggagacagcacagctggagcagaacttgcaggtggtgtggtgtggtgtgacccactccctaccgcccactctgtgctaaaatccactctatttcatgctatggtttcattccactgaggttggtaagccccaaagacacattctctcagattatcaccattgttcatgcaatagttaagaaaaagaaaaaattaggccaggcattgtggctcacacttgtaatcctagcactttgggaggccaaggcaggcagacggtttgagctcgggaatttgagacaagcctgggcaacatagcgagaccccatctctataaacaatacaaaaattaaccaagcatgatggtgtgcacctgtagtcccagatattcaggaggctgaggtgggaggatcacttgagcccaggaggttgagactgcagtgagccaagattgtaccactgcactctggctctgggcaacagaaccagatcctatctcaaaaaaaaaaaaaaaaagtaatcaaacagacccattctaaccatctccatctgacatggagtataacagaaagaacattcaaattgggagctggaagctagagttctagacctgttctatcattaactatagtttcagtgctatcttgagaaggcagtttctctctctggcccttagtggatatacaaggctcagttagactatggggcaatcccatagaaccagttttcaaacaaatctgagaaaaagaacagcaatgttggttcaaatagcagtttcctctgcatgaaactgggtaaaaaagctaattttataataataaaaagagctaacattaataataatacacagtaatcataaataaaaatatacatcaaaatatatacatcttaaaagtattagaattccaaggataaattggcagaaaaaaaattataactagagacttttaacttatccctcttgctctttggcaaacaaaatagactaaaaaataaagttggagaagatgtgaataacattaatgaaattgttttttaggtcttcttaggccttcttccccatccctcctagctgccatcaccatccctgggtcgtggcacacttactctacaaaataagggcaagacataattctacaagcaagctcacagtgtcatgaaggagagatgacttacaatgtcaggcagtgggagggaaaacaagagaagtcaccagatgggtggttcaagcaataggtgtgaaggaaacagacaaggatatcagtgtcaggagaagagagaaactggtggcacaaaagaagcaaactcaatctttctcgcactatttcaagccatagaagaagaaggaatgtccaactctgaaagggacaccagccgtaggaagaaagatgaagcaagtgcattttcggtggttttgttagggcaaaactgctgtaatttgaataatctccacatggtgattcagatggatccttccatgtaaactccagtggtgacgttctgctttcttcccatttatttgtagtactttctgggttgtgtttcagagtgtcatttaatgtcattttatgactccctggttgtaagtgtctgagtattaccagggcttagagatttacagcctattttaaactcagataatgatgtttaatttgttattggctgtgtaaaggttaacaaagaaataactcaaattatcatctcagggataacacattacaagagggcaattaagcacactacctggcattacacaaaagattgatatctcgttacaagagcacagatgagttcagatttcacaatacaggaaatacactcgtcaccaccgtctctctttgaataaacaaatttcgggtcccacttgccagcgccactgagtaactagtatagggaaagaaaaaacttttcaagaaaaggaaaagattgacatgtggccaatttcttgtagaagagctggagaagaaagagagaaactcaggatcctagagaaaatcaggttgatgttactgaagtgaaagattaggttccctcttagttataaacaagcttagagaaaaacagacatgtacccaataggcccttgagaagagaaagcaaaataaataaaaccatcagagccaaactgttattaaattgtctctgaaatggaaaatgaaaaacaatctattgccaccatcatttttgtctattttcttctcctcaagacacacattcatgatgatttggttcgcattctgtggatttgggggccaatgaagatataaataaatattatttttaaaaactcatcagatgaagatgtatttgaattttccagccctctctttctggagttatttgctaatgtagcatgtctcatgaaaactctcatctgacgaatgccctgtttacctccctcaaagagaacttgcaattttttttcctatactcattttccattccttttcttttcttccctccgcaatcttggtctctctacatctgggtttttaatttccttctgcatttccctacatgtcttctgctttctttcatgtttttactctggatcttgtctttcctctttttttttttttgtctttgcctcccatcttcccaaaccgtcccccatatccacacacgccctctcctgtgaaagttcctcccttccattttctctttctatcgtcgtgttcagtctgtccactcagctcttctctgtttagtctttctaccatcacatttctgcagttctctatttcctcatcgttttctttgctgcctgcctcccactaaatttctctagtaccagccgtgtggctcaaaacccatctccacttggaccaagacatcaaaagtctctgaaatgtatctagccccagtccatgggacctcagaactcaaggcagtagcactagcaactcaaaaacaagggacctgactaccctggcagaaaactcctgagcagccagaaactcataacagcgggccatgaaaattgtagacatcacaattttattgtcccaggatatttctggagtcctagaacttcctaagttacagtcgaatgagaatctggcatttgagtccttactcccaaatcctcctcacacaggggaattgggagagacccagccttctgtttggctttatgttgtccaggtacaaagggtgatgtatatatttgtcactgggcaccacagtttggcttgctccattacaaagcagtgcaaatgctagctacaccatcatcatcaatatcgctaagtggcctttatgaagctcaaacatattttgggtccagtggtaagtcttggggaagatggagaagacatggtccctgttgtctctgcacttacagcctggaaactagcagcaaccatgatcaccagtactgaggccatattgtatgagaaaaataagacaaattcaataactggcccctgttgacacataaataaactcactattcatttgttcctttaatcaactggctatatcttggttctgtaacccctaataaatggaattgttagtatttcataaggatgtgtgcatcctcgcaagtcctgaatgtcacacgagggagccaagcccagatgacactgtcatatggaaacacctgggatcaagggataacgcattagttaagcaaactaatcttgagcctttggaactgaaatatcaacaaaaggataaaataaatttgcaaattgttcttccctgtggacattagccaggcgtttgttctttagccaacaacaatcaacaggcacaacataaccgtaaaaatgccagccgaagagctaacccaataaataaaggaaaatcgttgtattatggatagactgccaatggtcatgctgcaggaagtgagcaaggaattgaaattagagagtggaggttggcgcaaaaatcaaacctacctcaacgaggggccataaatgttaacataagcttgagatacaatgcagtctttagcaaatgactcctagcatgggaagcaatcttatggtctttggggtacctaaaaagatgtgctaaaatgtaacccaatgagcaccaagtgcatgctaagtggcaggcactgtgcttggcaatggctcactgggccctcaaagagcaccattctgacaagacattcatccagcactggaaggggaagggaagggacatacagtctgtgtcttataagaccagctcctgccttcaaaaaaaagttaagagaggaggaagtgaaaaagtgaagaaaggaggaaggatgagacagaggaagaaagagaggttgatggaaagagatttaactaaatggatacttggaagagatctatgaagacatctatcaacatctagctgaacagatatctacatatttgccaaatattatttgcagttagtcttagcagatgtgctttcttttctcttacagtatctataattctaaataatctctccattaaacatggcatacatataaaggaaaataagtttatttgcttttttttttgtttttgagatggagttctgctcttgtccccaggctggagtgcaattgtgcgatcttggctcactgcaacctccacctccgagttcaagcgattctcctgcctcagcctcctgagtagctgggattacagggacgcgccaccatgcccagctaattttggtatttttagtagagacagggtttcaccattttggccaggctggtctcgaactcctgacctcaagtgatctgcccgcctcggcctcccaaagtgctaggattacaggtgtgagccaccacacccagccctgcatttttaaaagaactgctctacctaagtttcctcccccatgcccactcctacacagcctctggatcctaatgatgctgctcacataggaactccagaatggggatgacagataaaaaggaactgaaatgcattaaactcactaggattgtgatgaaaactaagagagcttccttttctgaggcacaatagccagaaaggcctcagtatcacccgactttagcacagacaaagggaaccgggagttcaggcaaaggaacataaggatcccaggccacttgcttgcctgaaagtggaatcaaaggtgccagcccagggccaggatcccacttctggggctgagcttgtggtcatcttgcctaaggcaacatgaagtctgctggtggggtgagggatgactgtgaggaccatgcagaggggagggctagatgggagacgaattttattttgttgctccgttcttggataagggtgtaagggaaaaaattattgatgaactactttgtcatcgttaagagtattgctgacacattcccagcaggctcactgcgaggcagccagcgccgagcctacccaacgccttttgtagcccagacatgtgctgtgcattagacaaggtgtgtaaattatgacagcgccagttcttcggcaagggcccggggctgagcacttctctgcctccttttccctttgtgttctatctccctacggcccttcctcaaagcaagtagagttcctcagagagaacattaacaggcagaggctcgggcttggagtaaatactgcaggatggaaatgcggagggaattagacttcttttccttgcaggctttggagtgctgggtgagaaataaataatgagggtagtaatggcccgattcttcccggctgcgtctctccccctgggtgtgaagcctcttctaaagtcagaatgtggctgcttgtggttgcagatttgatgttaaagccaacgggacaggcaggcaggcaggcaggcaggcaggcgggcaggcgggcaggcgggcaggcgggcaggcgggcaggcaggcgggcaggcgggcaggcgggcaggcgggcaggcaggcaggcaggcgggcgggcaggcaggcaggcaggcaggtggccctggacagctcccagacagctctcatctggggaaggtctcatccctgttctcagcctcattttgcagacaaggatcccaaggaacacaggaagttcctgactggtcatgtggaaaccagaatgggtcacttgtcctccaagaggctatccagagttgctcctccgcttccactctgggagtctctgggagctttgggtaacattggactgggagggttccatggataactaattatgtattgggaactgagcctctggaaaaacttgcaaaaagtgcccaaaacttctaggcccttttagaaaggagctgaatgccccctgagagctgctgcttcttccccatccctattccatcattgctactagattattttctgtgagccagagttttcgaaatgtttcttacagcttcaacttttcttgttactcccaaccctctccccaaaagaaggagatgaaagttgtttacgatgacttttatgtaggtaaggcagcaggtaagtagtctcctgtattggaacttctggaatcagatccggcttcaggacaatggagcttgtaccatggttcctatgggagcactggtggggtgggggctcctctccctgacttgagacaagctcagattgaaatctgatgccctaagaggcaacctccacctggaaggtgttcaggtaaactgactgaggagctgcaaggtcattatgcttagaacattgggccatcaatcctccaccctggccatgatccctggggaagaggtgacagccaggattattgagaactgagaaggggcaatcgttactgacccaccccaccaaattcacacatcctctgagccggaccattatatccttctcctgaaaaatcacctctctggcgaagcaccaggaggacaattagggattaaccaaagtgctcgctcctgccagcaagagtttgcgctcctgggggaccaggggtagtttgtagcaaagctctttgtctctggaactctctcatctttgttttctgtctcattaggagaggcgttgtccttccactctgtggaggactttcacttctaggtgtcgtttaattattgaattggtattttccccatgtccaaagaccttaggacaagactgacatgttaaaaaaagaaaaaaaaaaaggattaaaactactcaaaataaaatctacatgtggagtttgttgtcaccattggttccaatattataaatcttttaaacaatggcttttcttggaccataatttcaagcccagtgaatgatctgtctctaaactggctaaattttggtaaaatagttgcaagaaagatgagcagagtagaatgtatcatgatttacattgatgcccaacttccaaattgtactcaaagtgtaatttactttgactattaagataggactaaataagtctggcacagtggctcacacctgtaattccaacattttgggaggccaaggcaggtggattacatgaggtcaggagttcgagaccagcctggccaatatggtgaaaccccgtctctactaaaaatacaaaaactagctgggcgtggtggcatacgcctgtagtcccagtttcttgagaggctgaggcacacgaattgttggaaccagggaggcagaggttgcagtgagccaagatcaccccactgcactccagcctgggtgacatagcaagactgtctccaaaaaaaaaaaaaaaaaaaaaaaaaagtaggtttaaaacaaagtggtccctttcataatgctgtctataaaaacaattccgtgaccaaaattaatcatatcatttaaaaaaaataacagtccactaaaaggcacctaaacccttcaacttccaaatggtgacttcgtaaccagggctgagagatgggtgccatagctcaaactgagccccacctcattccataaaatagagtctattcctaaagaatagaacagaattatctttaatttcttcatttatctagaacagtgggatccatatacaacagtcgcatagtggctagtcttcttttgaggtagacaagaaatagaaagaagatcattgaggtacaaagggaagaaccacttgcccagaaacacaagtacaatggcaaaaaaatcaaattaaagtgcagaattttctcttgtctattgtgcttcctaccggtcatgggaaaacctatggaacactgctaagaagttagttagatataaaagaagagctgggagatggagatatatatatatagaatatatctatatgtgatatatatacattttattatatataatatataatatatataattatataattatataattatatataattatatattatatattatatataattatatattatatataatatatattatatattatatataattatatattatatattataaatatattttataaaatataatatatattataatatatattatatatattatattataaaatatattatatattataaaatataatattatttataaaatatatattataaaatataatatatattataaaatatattatatattatatatattttatatatatatatatatatagagagagagagagagaggtattttgggaactaaggcaggaggctcggttgagccccctgaagttcaagaccagcctgggcaacatagtgagactctgtctctacaaaaaaaattaaaaataagctgggcatggtggtgtgtgcatgcagtcccagctgtttgggaggctgaggtaggaagatcacttgagcctgggaggtggcggctgcagtgagccaagatcgcaccactgcactccagcatgagcaacagagcaagaccaagtctcaaaaaaaaaaaaaaaagattttaaaatgatagaaagactcatgctttgaagcactgacttcaaagcacaaatccttcccaaagtagccgcagtttaatttgtggttttaaaatggtcagggcctccatgcagcatgtctccattggaactctgctccctccccagcgcaagaaaaaaatgccctttctgcagaacaaacatccattttcacaaggagccaaacatccttggacagagacaaatgcagagtgggaataaaaagttaaaacatactctaaggcaggtcctcagaaagctgatccaggtgatcttcctttgaaacactgcctataattacattagggatagaaaataaaaacagaaagtaacaaacagatccagggacatcatcacaccaccctcaccattgactctttcattttctctgcttcctgcatgcacatatgtaggcacattttacagagtagtatctacaacagagatcaacatgtgttctattttttcaccaaacatttatttttccacattgctagacaacctctataattcttttcaatgactgtgcaatagtgcatcaaatctctgtgccatcatttgcttagtcattcttctcttacgaaatagattgctcaggtctttgctattctagataataagcaatggaatgaacatcttcatggatgtagggttgtaattttctgtggcattattccttatgactctatatttaaataaacaaccttctatattcttcctgatgagaaaactatgtcgtccaattaattacatttccatgacactgtctccttgccagtgcccagcagggattttttcaaagcaaaaatcagaagcccactagctaggctgatgttggctatagtgagacagggcacacggccaagtccccatccctcctttttaagagactggaaataggattttaacttctgtgttattcctcttcagaaccactgcaatttcttttccctttaaaggccgtgggactgagtaatttgaacacagcaggacccacttgattcatactttttggtcaataatccaatatagctactatcaaaaacactcctctgaccatatttacattttcacctttttgtcagatgacagcatagtctacctcaacagaagggataaataagttattcggttactgaaggagcaggcccttctagacagccacagaagcaaaggaattgatggaggtaatgcacataatccttaagaaatattctcactgagagatgaagtatgacttaaagagaactgttgcttctcctggctctttggagccatgttgcttcagtgaagttttcttctgcgatctgatcatttccatccctgatgttttaaattattggatcaacagggagagagcctggcctcttggtgagtggacaggacgccaggctgtgtgtcctgccttgggcactgactcactccacagccttgagggggcccctgaacaccccctgtggcctctgacattctccattcatgaaacgtgaatcactttggtatcgggtcccactgggaaactagagatgcaatttgtttcatcatgttctcctgccaatattgtcatttactgcttgttctcctctatttcatttgagtttttttttaatcatctaatccagggtccatatgtaaaacaaacaaacagctagataaagaaatggatggaaactaaaacagtctcatttagaaaacaaaagcacgagtcaaggttgctggggaagggtttcactgagaatatggagaagtctaaaagacaataacactcatcacccctgcatgaagctcctaggctcacgccaagccttcaaaccacagagctggagccaggctgcaatagtgggatcaccctggattcccggatcagacacagattttcacccctaaagaaccatcactttcccgtacacttgcaacttttgcacatgtgcacacacacacacacatacacacacacacactacagagaaagcagctcccaattacagatataaactagcctgatataacttgaaaagtatagcaggtttccctaaaaaaaaaaaaataataattttatctcagcatttttcccggaaaaaagaagacatcactgcatagtttccaagtgaaatagttttaaatgtcctacatttgggccgttcacagaggctaatatttgaatccacttgggagactctgtccccagttccaatgcaatcatcatgaccagcagggcctgggagatcttccaggtcaataatagttttcaccaactgcatacaagatggacttcagtgatacacgggtatgggtctatgtttcccaagcagtatttacagcacacaacctctcctcggctataagtacaaggctagtcctcaggaagtctatggaaaaatcataatatgcattatgtctgcattcccatattttctccttttcctgcagttcccttcacatttattctattctgcatttgaccaataatactgcaaaacacgtcctgccttgatcactgtgagaagcctcagctgggaaggacctggtaaggtcatgttccgtgcccattaaataaatgtttaagtggctgtttaagagcaaaaagtcagcctagtgtagtggtgccacagagacacacagtggttggaacccaaggactccaagatgtattcagcccatcaacctactacgttaaccactaaagtactcactgagatcactgtaattaatagggaaaaattctcgattgcaaagtgctaagtgcagttagaagaattaaggcttcccatttgattttttccttttgcctgaaattttactgccaatattaaattagcagcgttttatcatctttgctttttatatcccaggcctttgtttccttagaaaccaaacagaaaagaggaaaaaagttactctgcatagaaatacatagttaactgtccatgcctagaataaccaaactactcttacccctatttatcaacctctcaaaaaaaaaaaaaaaaaaacacgaaagtaaagcagaaataaaaacaacaacacatgctatgtgtgtgtaaaattgtaggaaaagtcgttaagccaaaaagtttgtgatattttatacagcatgctcacaaactgaaaacaaaattttgattgcttatatattctgaagtgtttcctgcctacatatcctcagaagtcccaggagcttttgtggacacatggaaaatttcaagttgagccatttttaagttatccatgagtaaaagcgaaaaaaaaaaaaaaaaaaaaaaaccaccatgggagtgggtgtttgagtttgtcataaaagaggaaaaaagttattttgctctttctttccttttccttgaattacttcacaatggctgaacatactttgcctgagttttctctttttttcccccagaaagaagagaatcacctttgtgctaaagccaagtataaacgtattcagcatgttctatacaagtgagcaccagggaattcttaaagcagatctatgtgtaaccgtaaaactagcattaccagacacaagtcagatcacacatcataatgacaaataactgcaagaatcagaaagcaagcatgtgcttagtactcatcagccaaaaagaatttgatgtataaaattattttgaataattatgcaaaaggtagatagcctttactgaaatgcaaacgctgcaaaacgtgggcaacttgggtattgactctattttgcttcttccagccacgattctctaagaaataccgcccgcaaattaaaagtatccgagattcttggcaaacggcatccgtgtggtatctactacattatagcgatcgcatgccaataacagctgggcagagaagttctggaatgtttaaagcagaagagctgaacaagttaaatagagggtagaagaaaaaactgttttgcagggaaacaccccagttagaaattcagtgactggcttcatttcatgaatctcacataaatatctgaggagactgctgacatcctaagccaagaagaaaaacatgcatttaaagaacaaggagagaagccaggacatggaataatcatttcactggacgccctccacttcagataccattggctcgaactcctattaagaaggaacagagaaaatggatgagagatactgcctacccaggaagggaagaaactttgcttttataaataaacctgtcatggagataggccacacatcagaacggaaagtcggggggaacagaaagaaaaggagcctgaggtcatggagtcctcctgtctcctatctgggctggtacaaaagggaaggggaaacccaatattagcattgtctggccgtggcattttttcccccttctcataatataactttgtgaatatgtttaagagagtgtctgctgttattggtctaatgaactaactctgaaatctgagctaaagacagctccctagtggctgctcactgctccacagaccgaaaggaaactcctttcaggggcccatcagggcgaaccactgctgacagcttggaacggcacaacacacagatttatttcacagacagccacagacaggaatttagcaccctgtgctggcctcctgcttagtggagaaggtgttaaaatgcaaccatgcagagctctccgttgaacaaaacccagtagcggctaatcaagcggtcacccgttcccggcagaaaatacccagcgacgcgcagctgagcaccgagaggagcacaatcgtgacagctgcttctgggccgccgtgctgcagcttgagagctgcctcggaaagctctaaatattttgcatgacctttcaacttacaaattaattgatttataaacaacggcaaatgttatttatttatttatgacatcttggaatgccttcttccctcgatacgagggcaccgcgctgaggggaacattccctgatgcctgcagatacatcagacccaaagagcggctctttctgtccttcatcaccgagcgttccatgaatggatacttgaaagatattgacaaatatgggcaccgatgtgtagctatttacctgcctgcactagaaaaagtccataaacattattatttaaagtgcataaacttttgttttatatgcttgcatatgtgtgcatacacacacacacacacacacacacacatctctaaggtagtcttacctacatctttgcagcaaaagttaataactccactgcttcggactctaagcaatagctcagcagttgatcagcttagcactttatggataaaggcaaaccacatttatcaaagcaattgaaattgcatcccagtaacttggggttgttcccaaggaaattgcatagagttggaaatattgtttatattgattacgttgctaatcttgctctcactcatacatgatacgatttcttatttttaggttgcgtttgtgaaacaactaacctgttctagtaaaagaaagcgatagcagcgaccaatcattttcctttcatattttctgtgtggggaatatgcctctagttgcctggctttaaatttcattttaaatagctttaaatgctgtcctcacctattggattcccaataaacatttctcttcaggtggcttttttttttttctccctgcctcaactttcaagtttgccaataataaatactaatgaccaggtattccttcggtctgatgctgcaaccaggaccatgccacaatgtcaaagccagagagacatcagctaaaatgcggatctgcttcccagaaggtctttagtaaactgacacataagtaaacatgggatggtaccattgactaaaaggaccctgagcaagacctggaaatgtgtctttgcaaaatcaagtcctcattcactgctaccgctctgtggtgcccctccctgctatgattctccaactgtcagcagtcttaacggagaatagaatttacttgaacttttttttaaaaaaaaaaagcaatgtgttatcatatttccaggacacatgcacagccaggagcatggtgacatcaatcataaatggatgcccgggcaagcgtcccctcctggaatgcctcctcctgagtgggttaaccttttcccacctcactgtggtaacttaacaaagggagccttgaaagacccgaagtctgagaaaactgaagcagggagagaaacttcttcaccttaggaagccaatccatttgttcctattctaagacagaaagaaagaatcatgccctgtttattttttcacttctttgcaagtgtatcatttccctagagttcctgtgtcacagatttttgttaaaggaatgagattttgtttttgtccttaaagtccaaaggtgggttgggggagaaaaagccacaggtagaacatacgagagagattttctgtggaaggttgcctttgcttagtatatataaatatacatattaaggttcatatcatactagcatagggaacatcgaaataaatgtcctttatatgaaaatagggatttttaggaatattacacaaggaaaaatgcaatcaaaaataactaacttgaaatagctggagaaatatgccttaaccctaaattgaaaatcatttcagtaattcctgatacatactaaatttatttctctattctcattcttgccttcttcttagagtgggtatctcctatataaaacaggccctttcatttataccaagagcatttgcattcgaaaatgaaatctattaagacaaagatgaagtgtgtgcagagatgggcagataaggttcttagcttttccactaatggacagagttaccattttatgcatgtatgcattctctgcctctaagacattttccatatttgcggtgtttgccagatttcaaacaggtgatcctagcaaggcacacagacgaagaaaatgctgtccctgtctccttgctcacagcatgtgccatgtacactcagcagccccataccgttgaccttttctgtgaagcatcaaacaaagtcttccatggtgcaggccttctgttatccattcattaaacaaatactcatcgatacctactaggtgttaggcattattctagatgccaaggataaacaaagataaaaatccctgcccacctgtagcagagtagtgggagttggtgggggattggaaatatagacaatcaacaagtaaatgagtcaaatatatggcatcctagttgatgaagagtgttaggaagaaaattaagtctggaagggggttaagaagtgctggttttgggaggagtatctcactaaagggacattaaaatccaaaggacgtctgaccccaaacttcacactgaaatatacagttccagttaatagatgtgaattaactgatgacgatgacgtccccattagtttttatcacttccatcacagccaggggcaaaacagctctatttcttcccatattcctttaagagactagatcacaccttgccacactctttcctcctgcttctcccactgacactgccctcgtgagttcctgtggtcttcccagtggctccatcatccctttaactaatacttgctgggtgcctgctctaagtggagtgcattgaagaaggaatatcaaggcagtgtggaagcacttctgctatatcaggcggttctaatcatctgtcttttccctccatcctgcaaaactctcttctctccttaattaaggcagaaacattcagagcatcccaactcagtacttggaatttttcatttcaggtacccccaaatagcaaattgaggtgctccagttataacaatgtggatttcctggctttctgatccacactactctcaaatcacatttccacccactattaaaaaaaaaaaatcaaggcaagacacaacaagatgactccatgctatcttgtatcacaggtaaaagaaaaccttgtcgatatgaaatcagacagtgtaaaattctctccctgaggaatctggcattattacatcccccaccaatcatggcattgtttctccaacaactgtatcagaggcagcatccggatattgctataacaccttcccaaaccatcaggctctttccttcaaaccatggaagtcagacaccactacagacaatactgggcccaccaaaacccaagctcttccaaaagagtccaaagccctcgtctgtttccaacaattatcaactctcaaaattccaggacttttgtattaggtgaaatgaaatttgacttctacatttatgaataacctatacctacatgagaaaactctatgaatttgataaggcatatatggagaaataatatatacacattataatatataatattaatgaatggcatatattttaaatcttaacttatcaaagattcactctggacactccacttaataacaggcaacaattccctcctgcttatattataaatataggcattgttccaagtatccaggatatgataaagagatacgccaatggatctcacaaagcttctgccctctgacttttattattagtagtagtattagtattagtattattttggtggagactttttggttttgtttcttcaggtactcccaaggtgggtaaaaattacaaaatcaaagttaagtttaaatacaaatactggctgaatgtgaatttgccttttctttcctcctttgcactattaggaagaaagcatttatttctctttcagaaacacaagaatactgaaaagttgactttgagggtttcgattttgcttaacattttctctttgtccttgccactgatcacccaaagcaagcaaggagaggaccttgtcatgatcccagcatagaaaatgcctgcagtacattcaccttgtacaccttatttataatcctctgtaaatttgcccaaaagtcgtgaactacataatactaattcttataggttgacatatttccctgatctttcatgagccacatggggaaacagttttctcctgatctgaatgaagaagaaaaacagtgatcctaatcaaccatttgcccttagtggcttccctaaacaaatctgggaaagcgcttaaaggcttgggaataaccatgaccctgcttgatgcactgtaataaccctacctaattatactgatataaaaactaattggaaagatagcaaatgtcagggtaagatgcaaatcgtagggtgttaattgctgaacaggtgctggaatagaattaaatgagcattctgattaaaagagtggaggaaacaaatgtggacccccgatagaaacttggccatgtgacttcttaagcagtccattccaccaggaaaaggtcatggtgctgtgacctctgttttgtgatgggtaggccaagaaaataatagtgaccacagaagaaaaaacaatccagcaacaatatcaacatgacttccagaagtcactgctaagtttgagccccagagacatgcagtgtgtcttacgagttcatagacacacaaataagcctggatagaatcaagaatgcataaatcctcctcttccctgccacaagggcatgccctttcatctttaaccagcagttttcacatcctctcaccacccccacattactaccacagtgctgagtgcaactaggtgctcgctatgcatttgtgggttgaccaagtagttgattaactgaatcaacagccttgtttgccttcaataacttgggatggtatgagagtaagaacattcggatagggcgacatggagattaactctgagactccaactgctataagccagtcactcttgttgcaaatggtataaatgatatttattaatgctccagcaatccagactttaatctacatacacaaaggagattttctttttagcctggtctataatgaaggttgcttcttcacaaactcctggtgacttggtcaagcctttgtccaaccatcactgcatttcctgacatgtggcaaagcctaggccaatgaagcctacattctcaagacagaagagaccctgagggcagcagctttaagcagatagcagctccttagccctgacctgatgtggtgcctccccagcaccacaatgccctcacccctgctgccatctaaagaagctccactccaaaaaagaaaaatgctctagatcaaggccctaatgtttttcccaacacatcacctcaaataacctagaaaggttaaaattatttcattcccaggtaggatgctaaagtttaagtgttcttgtctaccagtagttcagaggtctttgagatttatgatgccagaaacctaaaccagctctttagtgcagggagaaggaggtaacacagtcttactctattctactgatttttctcactccacttcatctgagcatagagcagcgattcattcattgtgctcattccacttggggcctctacccagagtctaccaactgcacaccactgtgcctcatcatatttgattttagtgatacagaccagcaggaggcagatatcagcaaagttaattcttctaactcagacctatgtctactaaaattggattgcagaactactcaacccagttgcattcattcattcatttattcacacattcattcgtcttttaaaatttaaccaacttggcctctacttagtgggccaaagaaaataatacaatggttacattagacaatactccaactcagcaatccaatttcaaagtgcagaggagggcctgaatgctttaagagggaaatgtggctacaggaggcatgggtgagatttcaccttatttatttatgcttttataaggacactgagaataataataaaacaggatgggaaagagaaaaatgttgctccagtagagagatgggtgggtagaacctcctcactctttccctcccttcttttgatctcaagaaaacctcgctttctcttgctcactctctctttaaggaataaaaataaactgtctcctgagtaataaagtcaagacacttgccagtaaaaattggttaaggtcatcacttttgaaggtcaaatgagttttagacaagatgtcatgtgggatcaccattcagcacatttagttaaatggttaaaaataataaaaaataatgacaatagtggagttatattttttaaaaggcagaagtcagagagaaaatgagagaaccagatgtctagaaggaatgctgggaaacgctgaagagaaggatttctccccccaccccaaacacaaccttccccaaggacctttccagactcattgtcagtatctaatgcctgtacactgtatatcttttacgtgtgtgttttgccatgcagtccccttatttaaaaaaaaaaaaaaagactcaaagggaaaacattttttaaaggatcacaattcatgttgacctcaaagtgaagattttccaggtccctcatgtgcccaccctgtctaaatacccaaaagaccccagaagttgtgttgctctgtgactagatggtaagagaaagagagcagccttacagtcggtttgcctgaaaatgataccattgatttaagtgagatgccacaatctacccagtttccagaggaagatctctgtttttgataaaatagaccatgaacaagtcagagcaaaggggctgttcctagatgcaaatgagccctcacaggaggtctctggggtcccaaaacaaacgcagaaccatgctgacagttgggtctgagttctagggcatgttctgtcctctcacagggccatgtgggcagccagccctcatcctttttatagtccgcttgcttttaccggccacagcatacccatacaaccaaaaaatctcctgtgccaaaggatgcttggaaactccagcaaggccactgcaagactcaagttccaagtattgctcattgccagtgacaattagaacaatctgaaaatgttcctcccagaaaaatacactcttttttgttgtaacaggggtgtaaacgccagccaatctcttttggcacctagagctataagaaggggtttcactgtgccacctctcgacaaaaacgccctcaatgagcatcctccaaggactggctttgaaagggggtttcgcgtatcaggttaatgcatgcacttggcgcagcccaactttcgcaccaaggctctggggtatggggtgataagagccaggttctgtttgttaacgataaggcaattatttctttggtacttcatagaaggaaaaaaaaaatcttacagcaaagattcaaacaaggatccctagggagacaacggacctcataggttggaaaagtttttttttttttctctcccttcgcaggagcaaacaaatggcccattgagagccacagaacagccaaggctaagttactgacaagcacgctgtcagttggcttccctagaagctctggataacttagggagtggaagatgggagccagagggaggagagacagaaaaaaaagacagacataaaatgagaggaaaggaagaagagaaaaggctgcaagtagaagggagcagagagactgtaaagaagtaagagagaaacggccggacgcggtggctcatgtctgtaatcccagcactttgggaggccgaggcaggtggatcacgaggtcaggagatcgagaccatcctggctaacatggtgaaaccccatctctactaaaaatacaaaaaaaaaaaaaaaaaaaaaaaaattagccgggcgtggtgtcaggcgtctatagtcccagctactcaggaggctgaggcagaagaatggcatgaacccgggaggcggaggttgcagtgagccgagattgtgccactgcactccagcctgggtgactgagcaagactccatctcaaaaaaaaagaagtgagagagaaacaaagggctgctgatggaataggaagaaaaagagcaccgtgtgctgatgtgtagttggtagcacttctcatgcatttggagtgtgaagaggtccctgagcttggataaacattacatcttattttcactgacccccaaccaacatttaccatttccttccattttaaatgtaaacaagccacattagtattatgggtccattgtattcactggaccatcagtgggatccatggcaataaaaaaaaaaaaaaaaaaaaaaaggcaaagaacccccaaacactgggaaggtattaggcatcctctcactttgcaggcaacatactatttcagaggataggtatgcatgattttcactttggaaaggagaggcttttatttactccctgggtcaggctttctgccttcaggccaaggtttcttaactttccctggaattatccaatgtgcaacaagttcaggcatcaaatgccaagaagcttttaggaagtatttctcaaggtcatcccatttgattaacagctaagagttagttccacagctttaagggccagatccagcatgataattttgctcagctggttcccactgggcctgtaaaactcaaaaaaaaaaaaaggttggctttggcatccccaagaagcaggtctctgaagcctcaatgttagttttctaccagggaaaacgctctgaagagaccaagatattccacagacagaatagatctcaatccaagcaattggacttctgcttcttcctccttgtccttggaattacataatagaatattggttccatggcactgcaaatcccacagtcagggtaggccagcagccagaatccaacagatcattggccccaggacctataggatcatctgctggttatggccctgtacagatgtgactagacagcagctgagcccatgtactcagaaattcccacctcttgttctgacatcacaggtcagcctggtcaactgatggtgaccatgcaaactcaccaacagctctttctctcctggtctctgggtgcttggtttctgagagcaacttgtctgtctctgtttcagaagtttctaagccaaagccatctcccaccccaagaggcagggagaacttacactgcaacttggagctacctttaagctggattaagttgaaaatcttcagaatggacatcatgctcaaaactgcctgctttcccaggggttgagaagtggggaggcacagctccaccttctctgcagagaaggaatgtttctacctgacaggaagagttcagggggctcaaaggataaggtgtgcccatgtgtaggcaggtgccaaccatcaaaggtggagcaggtcaggcacaggatggagaaagataagaaagatgtgccccaacccaaaccacccttactcaggctttcctcactgtctagttaatttgcttccagtctcagtgatgggaattagacaaatgctttaaaaactcagaagccaccataaaaatagaaaattactgcttcctgtcatgaccaaatattaaacacagtgcacacctaatgactctatccctccccggggaaggagctttatgaacaataaaatcccagcagacttccagtgtttgggtttggaggtctcattatgggctcactgatccaatacaatttacaagctcaatggacgccacttgaagtgaaaaccgccagcccagagttataaatgggacacctacagtgaaaccagcattttattcttcatcggggaatgaaaagaagaaagggaggtctttaggagaaaggcaccagggtgcaagtcgctaagggaaatgtttctcattgcctgagtaggaatcaaggttagacacccactagaaatgcagggcaatggatagaaagcaagggaggcccaaaaactgaaggcaggaagaggaaaggtaaacaaaggaaaaagaaggggatggagacaatggtggtggattaaagacaagtagaggaagcaggggtggggttaactttgctgtcccttttgctatgtaggttgaatctacacgacatcacattttcaaagtcagatttttttttctccagttctctacattatccagatacaggtctaaagggtggttactcttcatcctgtgccttgccagctggaggataaaatgcattagccactctacatttgcttgggtaagtatcgagcggactgttagcgttaaatcgaagtaaagtctggctcttgttcaagcgtcagccacaaccaagaagagagagtggagcttctccttcacctttaactctgtgcaatttatcactcgagcctaaacaatcccacatgtttaaagtgctggagaaggagacttggagaatgctaaacaaagggttttagggaagtcagaattaaagtgcacaggggctggacagtggacactaagcaaaaacaatccaggggaggtgacaagtccataaagcagggtctagacagaccatgagaccaaggcattgagaggtgacaaaaaaggagggaagagactgaacatgaggagggagtctgtgaggagaaactgacaaagaagaggggaaaatgctgatggatcccaataatgctttctgctcacctgtctgccttttaagtgaatctcctacgtgtgaatcagcttctgtatagatcagaaggcaaaggttatgagccccaggtaaagatttaaaaatcactaaaataaaggagccatagcatatgctgattgggtctgaagtcagttatggccacacaacatctctcttccccctccacaggctgagaaagggccactgctttccaactcctcacataagaaaccaggattcagataggtttgccagataaaatacaagatgctcagttaattttaaatttcaaataacaatgaattatttttctgtggaggtatatcccaaatattgcatgggacaaacttatgctgaaaaatgattgtttatctgaaatgcaaatttaacttggatatacatactaaaaaaatcattcatgtttatctggtatttatatttaagtagcatcctagtttttacttgctaaatatggcaactctagattcaatgagagggaagaattgaatgaatggatgaatgaatgaatgacagaggagtaagcaaacccgtgctgatgccaaattttactgtggttattatcatactacaagaacagcagccactttgagtcctcagctcatgtgtcagaaatctatttcctatgtgtatcttctgaagtgagagaatactttttgcatgtaagaaacaggctccacacaaaatcactgattatagtaaagtgaaatgccatcagtttgccccaagccatgtgcttgaaaggtaatgaatcctcagaccttcaggaaatcctccaagccttcagtacagttagaagccttgtaattcagccacaatctattctatgtgaatcccactgtttctcttgtccctttccttgcagagaccacctcgattttgttctgggagctggataccttgtctcttatcccaactgagtctttggccagctacacagctcccaaaattgttgatcttcaattgggtttctgctctgtaatgtgggataacatttccagtctgtagctaaaatgagttgtgcacgtcgttttcaattaattagaaaaatgtcctgtacaattgtgcataaagcaccaaaacagctcaccatttatctccagagagacccacaccttggggcttttttggaggggctacatggaaatagaagcattcagagacacaatagccccagccctcatctcactgccatcttgtgagtcctctgttttaaaagtcctggctacttaggggctttttaaggtactagtcccaaagtgtttgttccatctctgcaaattcctccatttctgtcatcacatccgtggagttaggaatttctccccttatttccctctcaaaagctcttgttaaatgggggcagctgctgcatttctcaccagctccagctccttggtggtctcgaggggaccaggaaagtttgccttcactggaaattttgaggttacaacaaaacttcttggaggacaaccatttcatcaatgagccagtctagactgatgaaatgctgactccttataggctttggtctaggctggctgacaagcttggagcctctcatcactcagctacttctctttctgatcaaatgtcccctccagctgcaactctaggtcaatgtgtagaagacagcaacaaagaacaattcttacaagattctaattcgcaaacaaatcatctagtcaatccctagtgggtagaatcctaaatctgcgaatcatctgtggataacttccttctctccttggtatataggtctcatttcccaaccatttggcatgccactctcttagctgggtcaaaaatgggcccaaagaacttatccagccctgttcactccaatagaagaagataataactggcagttttgggaggtcctctttggataaatatatagtcttatcctaatctttcccaggctccacgacctttgttcctcctaaagccagctggataagtttgcaaagagatgtcttttctaaaaacaaatacctacttcttatttccagcacagcacaattttagagtactgttcttctgctccttgacccatccacttcctagcaaatctgctatttaatcacatcacacaatttcataaggaagaagctggaagttgaagcatggcatcatctgttctaataaccacgtccatccagttggtcctctgattttcactgggaattgatccagaggtcttgggcaagcactttgaatgagagaatgctagtcatggtgagttggttttcgtctttctccctcttttctaaagaattacttataaatggtttggattctggcctgagtttctgctttctcacaaacatccaggctactaaaaaattcacagattgccagatggtataacagcagttccccgcaatgaatctgagcttcccagtgaacaaagaagacacgtactcatggggacaagcggcaacatcaacaaaagctttggagtggtgagtgtgctgggggaggggaagcagggtgtgaagaggtgagaaaaaagacctttccctccagtggctgataccagagtatctggcagggaaaaaactttctagcaggttcccctacttccattctccatgttccaatccatcctcaaagttctgtctccaaaataccagcctgatcatgaaatggcacaactcaaaatccttctacatcttccatcgctaacaaagtaatgtcaaaatacttttgtatgggcatataaagtcctccaaaatctgggcccaaataatctctccaacttctcttactgtctctcgtcacatgtacccaagtacctctaaaactatgtgcaggtttaggaaattctttcctttccaggtgccttttccaacacactttcttcctagaaggccattctgccccaatttgtaaatattcgaggtatagccatcaccccacctatctctgccatgatggaaattatctccgcacttcagatcttccagagtgcttatccttttatctcttttatggtactttttgcattttgcatagcatcctagtctatgcaaaggatatctacacatcctttgtttttccatataaactccaagctcttaatgggaaagctttctgtttactcaatcttattatccctaagaccccactgcaaggtccatggcataataggcccttgataaatacttactaaatataagtaagaattttattctgctttacaaccctagatatctgttcttgggcctgttctgtacctatctgccactggacataagatcgctaagaggttgtagaatgcaggaagtcacaggaattgtcctatatgaactggcagtagactcaatcacccaaactcttcaatgcttggcagtcagagattaatctgtgaattaatatctatggagtgtctgtagcatccaagccactacaaagatgcaatgtgagatacaggataattgccctgactttttttaaagcatctgttgtatcatgcactatgtgggcaccttacatgaatgtatttagcacaacaacttaaggggagaggtattattaacaccatcacacagctaataaatattggcatcaagatttaaatgccatgtgatgtctgatatctaagaattataatataattggaaatgtaaagcaagcacgaaataggtaaaataaataaataatgcccatacccctgaacaagagtaagaatttgtgataaatgtcaagggaaaagattttcactacaagaactaatatctttgaggaagtagaatctgaactaggtcttgaaaaagggataggatttatattggcagagtgcttgtggtgggtattccaggtggaaatagtgtatacaaagggagaaaagaggaaaaattcaagatctgtgttccggacagggggattcacagagaaagaaaggatgggattcgaatgttgggacctaggtaccatccattgacctagtcttcggagagctttttgtattttgtgaatacgtattttttgtgtgcttatttacgctgtatgctccatgagagcgggaaccatgcctattgtattcgctgctgatctctcactgccattcacaaatattttttgcttgatgactgaataacataaggacttagcaagtgaatgaatgatggaacgagcccatttatacacgactaaggatttgatttgcatcaaatcctaaaactccagtgtcaggaagctggccaggcaagcagaataagtgtaattcttaaatactaacccaattacatgagtgaactttccagcaccacctctgcaatcatgaggaggagagtcattttctcgaacaaaattttgtttcttttttaccacttggctccagtgtcctccaatgaagagcttcaatccatagggacactttttcccagctacagagtcctttatcttacctgtaattccctgaaatggccaagaaactaacaaaggttttgctaggaaacaacggaatgagatcatgaaagaatgatgcattcacattggatagataatctgtggtttttattgagaaaatctaaaccctccctgagagaatgaaattttcacttaaaaaaaaaaatacattgagtgcagcagcccacaccagtaatcacaacactgtggaagcctgaggtagtaggatagtttgaggccaggaattcctgagaccaaactgggcccagagtgagaccctgtctctacaaaaaaataaaatttaaaagatagcccggcatagtggcacaactgtagtcctagatacttgggaggatgaggagggaggatcacttaagcccaggagtttgagattgcagtgggctatgattgcaccactgcattccaacctgggcaacagagcaagagcctgtctcaaaaagaaattttttttaatagcctggggccaggtttctgtgggctcttcacagtactgggttctcccatactggagatgaagagtctggacagagaagacatatatattaataactccggtaaattattgaggagcagggatgaattagcatacctgacccccaaacttgaggcctcagcaagaatcagagaaagtagaattggaaggtagtgtattagtcacccatgaacccaaagcacttcatttgacaaataggggaactgagtcacagagaggaggctcttgacctctgtaacattagatagctaactagtgaaatgttcttgggcccaacacaggtcttctggtcctaatccgaggcccttttgctgcactgcactatccactcctcagtcacgccgaggatggacattctgtcaaatctgtcacacagttgaatgtgactcacacaatctcaagttaaatgctacttcaggggccaacagcacccactccttccacaataacagattccccctccagtgttcctatcagttcttccagatcacacccaccaggcccttccatcttcacagctcttaactctgcagtttttcttcctattacaccaaaatctttctctctgtaatttctacctattgactaaattccagtttcacaagcaaactggctatgtgaccttggctgagttacataactccttcaaacttgagacttttatcaaccattgagaattaagatgattttactagcacaaatgtcatagcacaatgcccaacatacaataagtgccaattaattgttagataaatgttattattggttttatctatccttctcagagccagaaatcttcactcaggagataacactactgatatatctggtttacccatttccgaggaatgggaggtaatggtcaccttgcagacatacgtcaccttgtagatataaatctcacctgcagctcaactccaactactacccaaattctatctctaccatgattctctaaaagtttccgtcccacaaatcgcacttcactggagttaagaaacacacttgagagacaggaagaacaagtacggcccaggggaaagtagatccaaacatatgcttcagtagaacaagttacttcatgaggcagagaaaggcaggaagagactgtgttagacagcaggagaagggccaatgacaagcctggaccaaaggtgaaaccagcagatgacaatacccacaccaagatggtggaagaagaaaacaagagtcacacccatcaggatgactactatcaaaaaaataaaataaaataaaatataaacaaggattggtaaggatgtggagaagttggaagccttgcttgtgcttatgcacaatatggaagttccttttaaaaatgaaaatgtaattaccatctagtccagcaattccacttctgggtatgttccccaaagaattgaaagcagagactcaaacaggtactcatatactcatgtccacagcaacattatttccagtagccaaaaggtcaaagcaacccattgccagacgaatatacaaacaaaatgtggttcatccatacaacggaatatcatttggcctttaaaagaaaggatattctgacacatgctacaacatggagagtccttgaggtgatgctaagtgaaataagccagaaacaaaaagataagcactacctggttccatttacgtgaggtgtctagagtagtcaacttcatagagacattaaatacaatggtggtttccatgtgcttgcgggggtaggagacgggtagtggggaattgttcagtgggtacagagttttagttttgcaagatgaaaagagttatataaatgaatggtggtgatagttgcacaacaatgtggatgtatttcatgccaccaaactacacacttaaaatggctaagatggtaaattttatatgtattttaccacaattaattttttaaaaaagaaaatggtgtcaggagaacccttcatgggcaaataaacttcagtttattcagatctttttgaataaaccttttgaatgaaggtcattgtgttgtttgtttggtttctcaagaaagaaaataaacaaaaacacatcaacacttaaaatggtcctcctgggaacagagctcagaaatatatgagaccaatgtccagggacaaaagactgggatatttagcgtgtgagaaataggttggacctcctctttatttatttactagaaaataccctaccagtacgcacatgggtagcctacgaagattcaaaataaattattgccctctctatccatctgactttttatggggctgacaaggacaggaacaatagggactcatcttccttctcccacattagtcagactgtccctaaagtcctcttctcacagatcaccagattatcctgagccccccagaggctcactggatcgtcagagaacctgccagatagagaagagagtttgaaaagaacacagcccataacaaccaagtttgaattagagcttccctctaaaacacaaatgcaaatccatttgagccttttatttttatttaccacacaggcctttatagacaagagctcagctgaaggccacagtaagaatgatgtttcattagtgtttctgttttgttctgttctgttttgtggttttttcccctgatggggactttggatttctacactaaaaattaatcaggagacccttgattcagcagcaagtcctgctaggctgtgttttggtctaggcttttggagaggggcatagttgcccaagaattcacaaaagcatactgaacagaaaaatgaaaatagaaaataaatttatgtttctagagagattaaggcagggagtaatttagtattgggggaaaaaactccaactctggggctaagtcttgagaagtggagaactaagtccttaatggaggatcccctattgtaaactccaatggttttcaattaaagggccacaaagtagtgaaagcgatttttcgtatttcaagcagcctattagaaacagaagatctgctgggatatggtcacatggactcaccagaaagccaagttgttttgtgtttgagctggaagtctcccaagtcagtgtggtaacactgattatctcatcccaatcaaaaactcttaattggccattgatggtatcaagggcatttctgagaggagatgttttaccttcccattttgttatacgtttttgattaataaaaatggaattatagctgcattattatttgtccatagcagtttggaaggcaaagtcctgcaaaaccctgtgttcaccaaggaagaagcttaaggggtccttggtggtgaaaagttggggaaccatcctctccctctccctggaacatgcacatttcaagggaataaacagacttcttctgagccagagtggagtgtgcctgttgtgtgagaaaacgcaaagacagacagtgtaaattaactgcatctggtaaggttaggtgagaagggggaggagataattagttggcattataggaacaaggacaaggaacagagttctatatttacacagaggaaatccaaaatagactacattgcacccatttggggcttgtaagggaactcacggagttggcagatggacgcagagaccagacgcaaggctgatccaaacccctggataccgtaagcaccattcccaccttcaacaaatggaaacctgactttatgcccttttttttcttttcttttctgagacaggtctccctctgtcatccaggctggaatatggtggcacgatcacagttctctgcagcctccacctcctgggcccaagtgatcctcctacctcagcctcctgagtatctagggccacaggtgtgcaccaccacacctggctagcttttttagtttttgtagagatgggatcccactatggtgctcaggttgcttcatgccattttacttctgaaaatgaaggcaagaaggctaaggtaaacccgaaagacattcaggagcgatgagacaaggtttcagtgagagaactcttatcttaaaacaaaagcccttcttgtgtccatgtgttctcattgttcaattcccacctatgagggagaacatgcagtgtttcgttttttgtccttgcgaaagtttgctgagaatgatggtttccagcttcatccatgtccctacaaaggacatgaactcatcatacaggaaggagaacatcacacaccggggactgttgtggggtgggggaaggggggagggagagcattaggagatatacctaatgttaaatgatgaattaatgggtgcagcacaccaacatggcacatgtatacatatgtaacaaacctgcacgttgtgcacatgtaccctaaaatttcaattaaaaaaaaaaagccctacaataagcaagccaaacaaatggatctgtttatagtaaggtgggctcacttaaaacctgatactggactatttacagtaccctttggtatgtatgtttccatgtgtagacatgcaacatttcggaagtaacgcacatttcaagtgaggcagagacatcactgggctattttattgcacataggatagtaaaaataaatgccacagtcacataaaactcataatctgcagccaagatacgatttccactttctcagaagaatttaaagcatgctagcacaaactatgaaggcgcctaatatgaaaatcttttctttctatagacacaaagatactttcttttgtacatgtaatatgtgtgttacataggaagaaaacatgagcatattcaactttatcggtgaatgcagtgagatgtagttctttaaagtaagagctcctgcttagtgcagagccattaaggtgtgtacttatgagaagcaaggtgcaggtgagtatttacagatttgcaaacatttctaaagccggtttacagggtgtttattacgaaaaaggatgtaacagtcatgaggttagagtaccttcttaaaagagaagctaaagatagtggaaaagactagatcaagattagtgagctcaatccacaggccggaaaggacagggtctaggctgctctcatatgcatccagtctcccagagaatccctgggaaacacagaaatgaacagatccaactcatcagttaggacagaaaaagtgctgggagaatgaggttgtggccatggagagaagcacagtctggaagtaaggacagttctgctgtattcctttttttctttttctttttttttttttttttttttttgagacagagtctcactgtctctgtcacccaggctggagtgcagtggcgtgatcttggctcactgcaatctgtgcctcctgggttcaagcgattttcctgcctcagcctcccaagtagctgggattacaggcatgtgccaccatgcctgactaatttttgtatttttagtaaagtctggggtccactatgttgaccaggctggtcgcaaacccccgacctcaagtgatctgcccacctcggtcttcctaagtgctgggattacaggcgtgagttacggcacccagcctggaagtaaggacagctgtgttctaatgccagctctgcccaaccagctgcacaaccacgggcaagtcatgccaccgctcagcgttcagatttttcagctagatgaggaaaatgactgactccaaagagtccttgcaactctatatatttaagcttctctgtactttcaaaaaagaccagagcaaccccaatagctccctaaaacgcagctcactggaaccttctaaaatggcaaagacactatacacatccaacaaacattttatatttgcccatcatcctcttcaagcatctcagagaacactgcaaagctgccattgatatttcagtagcctcttgaagcctacagaagtgactgcacctcctaacccatcattatattattgaagaacaaagatgctgagtgctttgtccaaggtcagaagctaggacaagatcagaattccagcctcctcagttcctaggctatgctatactttccacgaagaaaccaagctggctttctgggaagaatgccagaggttccattctcccaactgagaattcgttggaatattggaataacaactttggagactgtggtctctccaatccatttcaggacctggctagaaatgtgaaaacccaaagaaagaagcaatagggaattattccgttttttaacgaaagagaaaaaaattagggatgggaatatggggtttcttaaaaattacatgatttctggaagttaatttggtatttcttcattggtttgtaagttctgtttccaatcacaaaaaacagacagctgaggatgcctaaatcacatttcagtgaattagtgtcttgtcccaaagaatctttcccattctgaatataacatagaacacagaatgcaatcctccatggtagaaaggaatctccctgaacacagcagagagcttgccataatcccctaaaccgtaatctgaattgataatcttccagccaagcagcaatcaccgagaataataaagtgggtgccacttaacttggggcacattgcttcttctagaaaactgattgagaccataccctgcccgaaaggagaggtgccatcgcttatatcctgcaccacacatactacttattaggctgaagctggtgcacctggaaaagactccaccacagatttagagacacgtgttccaaaggaagattctggcttcttccaagaaaggccagcatgaggaggcctttgttggatgagcttagtgacttgaaataacatgaaaccaacttgacagcaaagctccatggatcagtactcagagttgaggttcatgaagaaaaggaaccaaaaatgattgaaaaatcactttttccccctacctgtcaattatgactgggtccgatggagtctcatttcggtttccacagcttttcttttcgcagcatcgactgtagattgggaaggaaccaagagtgaaagaaatttattaaatcaagaaaatgcaatgagcacatgacaagaacattttttccccccagacagagtctggctctgtcaccaggctgtagtacaatggcttgatgcctccttcttggctcaccacaacctctgcctcctgggttcaagcaattctcctgcctcagcctcctgactaactgggactacaggtgtgtgccaccgcgcccagctaatttctgtatttttactaaagatgggttgttaccatgttggccaggctggtcttgaactcctgacctcaggtgatctgcccacctcggcctcccaaagtgctgggattactggcatgagctgtagtgcctggccacaagaacattcaccttcgtgaatctgtcttggagggaaacaacacacactggggcctgtccgaggggtggtgcagggagggagagcctcaggaagaatagctaatggatgctgggcttaatacctagatgatgggttgatctgtgcagcaaaccaccgtggcacatgtttacctgtgtaacaaacctatacgtcctgcacatggtcccctgaacttaaaataaaagttgaagaaaaaaaaatgaatctgtctaaggtagcttcccaactataagctacttgagggcaggatttatgaccatgttttataaaataaaaaataaaaaacactgaacctgaagccaaaatatactcaaattctcactctgtgacttagaagctggctaattctcagcaaatcacaactttcccatgagtcatatttgtaatcggaaccacggaaggttggatattaagatggataaggtcacttccagattgatattcaatgattttatgatattttagatatttgtggctcagtaaataattaaagaaacgagaggaaggaaaatatgtaaaatagactgcaagtggctgccaggattactataaaccttatttacataacatctttctccagagatcttgctatactttataaacatttattcattcacttatttccatcatttttcagatgatgtaggaagaccagaactatggtatacattttaaaatacgaggaaaatgaagcaaggagctgttggatggtagctccaataatttttaccaagtctgaaacagaaatggtatcccactgtttgtaagtcccagctctgaaaactccactttccaagacgtccctcttgtgctgggtacctgatagaaagacctcaataaatgctgataggattagctgagagggagataaagaagatcccctggggcaattacaacaaacagaaagtactccctaggacctgagaggggtgcaaaacactccagtccaaaggtatctgttcgaaaatacctagacaaatgtgagaagggcaaaggaagcttgctggtaagaagcactgggaattcactcccttaccaccagggagcccatctgctgcctatcagggctacagacttctgaatacctctcagctcatctcaggtacatggtccactatcaactatagttggctaaggatgtagccttgacatggctttttaaaaaatctttatcatccatactggttggagaatatgcctaaggagtaagcacactaacaataaccaaactctatgtgaacactgccctgcccatggtagtttttctgtagcataagtttgacatgataccttaggaagattgctgaactgggaatcagcgttctggtgtccaagctgtcaccaaccagcttcacaaatttagtcaaatgtctttaacccctctgggctttttctttcttatgaataaagtgaaagtgttggatttgattctctctagagtgtcttctaggtctaagtccatgaggctaggggattccatgagcaccctttgaaagtggtgataacataaggaaaaagggaagtcatgtgacagcaggaacccaatggcctagcaccaacccagtcttagaatttttttttttttttttgagacagggtctccctttgttgctcaggctggaatgcagtgacatgatcatgactcactgcagtctcaaccttccaggtttaaatgatcctcctttctcagactcccatatgtagctgagacaacaggtgcacaccaccacacttggctaattttttatttttcattttggtagagatagggtcttgctgtgttgcccaggctgatctcgaactcctaggctcaagccatctgcccacatcggcctcccaaagtgctaggattacaggtgtatgccaccatgccaagccccagtcctagctctgtggctctctgcagctcatttgccctctctggttctccacagaattaaacacaaacaaataaatatcttaaaactttttaaacccacctctttcatgggtgtgtggattcgcaagtgagtaagtctaccatcctcagaaagtaaaatatacttgagagatgcttaaacatttgcagcaaatgggcacaatgaggttttaagaaatttaatcaaattagtaggaaggaaaagaaaaatggtctcaactttcttaaataccagagtttgccactgggactttctgaaataatatttggcctttgaaattatattaggtcttaacttttaaaatttcaatccatcccaagattaacaccaataaaaatgcaggccagctgctctcccacctcctaaagcccttgtctctcttcccaaatccctaccccccacccatttctcccacctttcctgtttctagaatattgcttatgtcaacgtaatacctttgcagctcaggcaaaccatttttcttagcaacacagtttcaaaagacccatacatgccagctacctacagaccttcaagcaagactctcccttttgacatcaccagcatgtcaacctaaccccaaatatgtgtgcaatgccgggtacaatttaattacaagagcacacactgtcagaacgtgccaatctgtttagtttgggtaggaatgattctgagggggctgagtaagttttcaaaattgttcagctgaattcagctgccttccgtggggatttcctctggaggaaaagaaaacagataaaaatgtaagcctggtgccagtgtagtataatgtagggaaagaacttgggaggaaatgatattcaaagaaaaatgcagataaactttaggatccaatcctccattttccaacagtaacatatttaaatatcatctctaatgctgatattcagcacaaaacatacatagaacacactcacttggccattgaactataatagtaaaggtataaaaataatagaacttggttgaattagccccatttgagcccatcttaaatttttttctgggtctgttaagttggccaaagcaaattattatttttttttttagaaaagttctcactaatatgttctagtcgttctttgtttttaacggcattcagtcctcctgccagcaatattagcacaagcaatgggaagtggagaacctgagatgtttgtgaacctacactccccaaacagtgtggaacagctaagaaaccaggtccctgaattactcagatgataaactcaattctgccttccctttgctgtgtaaacaaagcctgagtgaccaacttcaggttcagctactttagttaaaaggcttttaggattattctccaacaagcaagtctgaagttcctgataagtgttttctaaaactaaaaatgactctaagattaaaaaaaaaagtaataaaaaaataaataaaacaaagagaagaggaaactgagcttggcaataggttaagactgtgttcgtaacaaccccagagagactcagaggtgctcttttttcctaatgaatgaaaatgaaagctgttccactgtttctctctggcttggtttggtttattttattctagtacttatttggagaatcttttacttgaaacactctcaatttattctccccatctccacccggagtctttgaaggagagagaaaaaataaaacaagttggaagtgggaggtggggaaatatgagaactcttatcacaatcctgaatcatacctgcattttttagaaagggaaaaagaggaataaaagatggctggggaaggggaaaaagccccagccttggacagagagtgtcccgtcagccaaactccagctcacgacaagcgagtgtgtccctttcccctccaaaatagtttttaaaattcaaccttcaactttcaaaaatctgtctctaatttcaaactcaaataagcgcacagcatggtggcttttgttttgttttcttctccccaactcctccctgcgattgcataacaaaagtgtctaaattcacaccatctggccgataaagacactggccccactgcccggctggcccatctgattagggccctgtctagcctgcgccttgtggcgaaaagtcacagctgtggggtttgctcaagctcaatacaactctgttattagccagctgtaggccttgagacgacttctgttcaaattataatatcttttaaccctctgagcattgagggctcaggggtggctggcagcgacataacaactagatttctccttgctaataattggcaaaatgaaccaaagcagggaagagaggaacagagaccattggggaagggagaaaaaaaaagttattcctaaagagatttattttgtctctgctttgttcccccattcaaagctaaacacagatttatgaggcttttactaaagattacggaacataaaaccatccggggaagtgcccaggtatgccaaataacactatgcaaatgaaactaagtatatgcaataacccttgagaaacagggcacctgattcatctctcaatcattgactgctacaactggctcttaaaatgtaagagaaggaacttttcccccttcctggagtatcaaccagctctaactgacagattgaatgagaacttcccttttggatgcatctaatatttgccattacccatctcatctgcacacatgtacacacacacatgtatgctgcagacagtatccatccaatggatcatttatttacacataattaatatttattttaaattgtagtttgggaagaaaacagcagagcatcttcccaggtctccaatgcagagaagttacagtacattaaatttttatattgtgttactaatgcagactaaactagaggctttaaaaattgatgctgctacttaaacagcataaaatgaggaggatttgattgggcttaaaaataaaaatgtcagtcttaactacagctggatggggcatgcaagtattattttaaatgataggtataattcattagacaatggatcaattttttgttttctttccttttcaggaggtaatctctccaaacaaaggcataaaaagaaaaacctcccttcaactaaccaacctaatcaaagcgttctatttaaatctaggtattatatgaactacatctcagaactgtattttctttctgaacaaatctatcaaacgtccctgagatattggagtatctatcttcttactcctcccaatgccttccccccagctactccagcaaggaagcctccattgctttcagctgaagccactggcatttggaaagtttgttttggtacttggtcaaaaccaaaacaaacatgtctgattgttatggtttcttcctgactgggttggggagggagacagggcttcagggagctgcccgtaaaacagtacacactaaatcagataatctgcaattacccaaagctagtaagtctggagttaggagacattgactaaagcaatagccaagtaaggaagaattgagactttccctccaatcaaagatttttggaggaagaaaagcatgtatggagcagacatttaaattttcataataaaatagccacactcttcccagagtttcctatttatatcctttcttgtctgcggtgggatccccagcacccaaccgataccgggcacacgttaggcactcaataaacatttgttgaaagaataagggtagatgcaattcttctgattttttaaactttcttctagtcaggcagaaaaaaagggtggggggggaatgcacaggactcaaggtggaatggattgatctctgaaaggaagatgggaaaggtgcaggaacgccagtagactgaacctttcacgacgtgaatatcagaatccagctgttgctccacactccagatctcccagcgggtcctctccctgcccctcctaacgctggtgggaactggactgatctttcttccaggtagttccttctgacctgagaaactcccccgacacgagaactcctaagagagcaacctcccgggaggaagaaacgcccacgcatcacagcaggtgcctgggtgccaggaagcaccccggaaatgagccgctggaccctctggtggtccctcgcccagactaggagtcgttccagggctttcactcagtaactccaagtggagttactggaaatctaccacaagaggcccggcgggaactccagccgatcccaaacccggcccggggttgcccagcccgcttccaccactaccactgacaagggcacagtggagactttccacgtagccggaggaaactcctgcgacatcagagaggtggaatcccgagtcgttctgagtcccaatggttatgctttaagacacttgcatgaaggggtttccgtggatctacactctgcgcccgtctgcccgcgaggcctcccagctgcgagcgctcagtcctgaaagttagtcccgggaacgcggcgcgccaaggcggggctggagcacctgcgggctctccaggaaggcctgggaaaaggcggctcttacctacacatcacttcgtgcgtcaggagaactcggcacatttccggattcttattctgtccctcgtaagcgatgggctgtgaaggaggtagtggcaggaaaggaagatgtggagaggggtggggggcaaggaaagaagggacttcagaacaagcacaacatcgctttccctcccactacctgccaccgcattaggaattcccgcccgcagcacattctgcgcggttgccgagtttggactcgactgaaatcatagagaagtttgccccagtgagaacatcattcttagcaaaatggaatgtttgcgggaactgaatctcccaataattgtttcctctccatcctttttgttcgcctcttactgcccccagggtttccctgagccagacaaaacaggtcacttggtgagacagggaagaaaaaaaaaaaaaaatcttccctagcagacaaggtgctgggagggggacgtggagggggctgtggagtctgacccaggaaatcgtggaggaggggcaggtcagaaacaaactggggggtttgggggtcggggtcagagacaggcgaagagaagccaagtggcctccggctcacctgcttggtgaccgagtcgatgagcctgacatagaggtcctgttccgtgcggacacctgcggggaccggaggggcacgagtcaagggccgtagagccccttccgggcaccccaaacccttctctgccatgggtctgaggcccaagcagcctctccatgctgagccgccctggagacggtgacctcccaatcccctgtcccaggcaagcctcccgccgccctgggctccatgcgatccctgagagtgatcatggcaaggtcagcgcgtgcggcccggaagccggctgctaggcgccggctcaccgttgctgtagaagagctcaccgttgctgtagaggagctgtaacttgtagtgagtgccgttgttggtcttctcgttgccttgttcctgaaaagacaggcagcgttcgattcccttgcctttcagccccccaaaatgagggaaagaggagacagtgaatccccacctcacatcccttctccccatcaaaaggcagctttgagtaaccccctgttcagccctaggtcaaagggcatgagcatctgcctgtccttggccgcccccggaaacttgccaagactcgtagccacttgaccctttccagccctctgtctcccttaaaaatgtcctcagaagtgtgacccttgagcttccgacaacaggaccacttgccaaagctgcctttaaacaggcaccacccaacccatcgggctctgtctgtccttaggaagccccaaggcttcccttggcagaaaagtgaagggacttgtcatttggaaaggcagcattcgggcctatcccgcgaggactgcgcacgcagggccacgagctcagggactgagttccaggttcaggagggactttgggaagtgcctactctaaagctcacattgtacagctggggacacggagacccggaaagggcaagggattttcctttggtcacacataggtttcggcggactgtccttcatttgagaccgaacccagcccccaattccaggcttgagtttggaggaggcgctgccttggagaacagaacaggagagaagacacggccagaaggcaggccaaggctgggctgccggtttccacttagtgccgcaactcaggccacctggctctcgcaggtgcaaaataattaaaattaacccagagaaggggagcggcggccttgggtgtactttttaactagtccaaggggcgtttgctccgccgtcagtccataaccaggcgctactaaggcctccaggctcggtgcgcagagccgggagcgctcctccagctccaggttgggggagtcggggtgggaggaggttcgggaaatcgactgatttagaggctgggggtgagtagcctcgatttatcatccctgatggtgagagtggaaaagtgtcgcgagagtgacagatggaatctttagtgcttcgcaagagggagttattaggccgcggggtttggggggtactttccgcttactttgtcattctccacaaagtccacgaaggccgtccgctcgatctccaccggctggccctgcctgtcatagagcgccaggacgaagtgaaagaagttggatttcctcaagttggaaggaggctgtttctcaaagtgggcccgggacagggcgaccccgctgcacagggagaaaaacgggggaacacaagacacggggaagcacaaaaaggcgatgttactaaccgcccacaacactgcagaggggtaaggggtccacttcccaggtccagagttctgaacccttcgggccttttttccaattcggataaggaagaggagactccttaaaggagtcaccgtggccacgggggttgggtggcagggttgatacctggggtctctgacaccaccaagtggtccggcatcccaccgctgggccactcaccatcccgtctttagtcgaaaccgaaagaccccggctgcagacagaggcccagagtggtcccctaaggaggtggcccgcgtcctataccgtggggctgtctccatccactccctcaggtggtactgctgggtgtatcaggatgcagagctggggcccagggttaggggaataagtgcctcctttgctttggaagaagcgacccttttatttagtattaattcgagttatcagtcctggacccactgctcacaacgcccaaatgctgactgggaaaggtagtgggtaagaaccccaaggggcaggcgggagagtaacacagagtccaggtctgggtccttgggctgcttgcctcgctcttccgaaaagttgtgcctgggacagagacagggcggaatcctcgcgaccagccccggggatcgctggccaccacaaatgagatgaccgacatagggggccctccctcccagaggtgctaggtggggaaaagccaaactgttaaaaggcgagaacctcctttcctggggccaacgcgatccccactcatgctgcgttttctggcggcgccagccgaacccagtgactgtgaaacccaagttgggggacccggaaggcgccctcgagcgtgctgagtgtgtgcacacgcttcccagccaaccggtcgcagtcacagcccacctggccatcagatcccatttcaccgaagacttggggctgaggtgaacgcacagattgcgggagctgccctgcggcgctggggtctcccaggttgaaccccggtgcgcaagcaccttcattcactcttttgaaaggggtaacattttggctaagctctcccccactaagtctgctccttccagcttcaacaaactttttgatcccgggaaggaaggaaagcgagggaggcgtctttaaggagcccagctaaggaaatgcgcggcacagttggctctgcggtgctgccttatttcccttagctcgcaggcgggccagtcccgaagcgctgcggaaagccgcggccgccgcgctgtgcggtctgccggagggaaatccgcgctccccgggccacaggagggagggaaccgccgccggcccaagtcccggagcgataaaacttctgctttctccgctccaagggtagaggccggttcgctctacccgggacacctggccagtttgggaaagggatcatttctccgtgtgatgttggcacttaaatgtgggtggccaggagggcagcaggggaagcgagggtagtggaagaagttcatcggctctttgggggtagaagggctgcctctctcgcagacaaggacctggaggccacaaatcccaactcagtagtggtgatgagagagtgggaccgtaatgtcttcgtagggtggcaccccggacatggtatttactatcccagcacgcagacgcctaaacacaaagtcaacttcagggatccgcaaaaccagaggctggcgatccctgagccagtctagctgctggtggccttttctcgcctctttcttcttccgcaactctttctactgtgactcagtattttctcttcttttaaatctcttcttttctccagttccctagctccgttcgtctggctcactgttttatctttgagccgggaccctccagcctgtcccccctcccagagctcccggccgcctcgtcttcccgggcagccgctccggcttttcccgctcccctcgccgccgccaccctctggccgccggcctcccaggctccaggaatcgcccagcaagatgcgggaggtaggcgctcgcaggcggcgtggcgaagccaagagtggccaggaagccggctttcctcccgcgccgccactgccagcgccggtgttcacgctccgttcggggccaggccggctcggcttgcaggactaggggctgagctgggagatgttgggggctactttatttttccttgcaaagagtggactgtggtaaaggagagggagagaaacgcctacgacccaggcagttcaggaactcgagtgccggctgccgggtgagcgttcgcctgactgcagcgatctgcttgcccgagggcgagccccagcgcgcagggcctgggcgacagatggggggacagggagagagaaaggcacggggtgcgcggggggggtgcacacggagagacagaccgtaagagcgagagacagcataataattgcgcggccgtgtcgttacctctgcgcggcgacattagcgtccaccactccgacattccggacccaggacctgaccgaatccatctccgcgcccagcgatttctctttcagagttggtcctcttcctaaagtatcttgaattccaaacatttaaaaagtctgatcctctactgtcgctttaaaagtaagagttacaacacagtcctgactgttcccaacgttgccagcaaatcgtctcctccaaagcaatccaagaaaagggatcaagtgcccaagtttgagtcttagaaaaaaaaaaaagataacccgtcctttgcttcactggcgaggtgcggactgatgtagtcaaagtttgggttcttatcctccgcaagttcagatctgccgcctcagccactccaccctaggtcgctcgcatccttccagctgcagtgctgcctcctgaaagtgatcacaatttagaagcatcacctgttctgggagaaactggaggaaattgatggctgcctaatctctccccttcctccaggtcccccctccctgctcctccccaccgttccaatttagaaaaaaaaaaaatccccaacaggatcagttgtaaaaagaaggggaagacctggagccgagaggaggcggtggctgcgagcgccacggagcccggctgcagccgcgcgcgggccccatgaatgggttactacggccctggctgcgggaggcggagctgcggcccgataaggagcctcatttgcatggacgcgcgggattggccggcgcctggcaagccgggccgacgtcctccggcggcgcgcgccacgctctgcgttgccgggactccgggaggtgaaaggggacagaaagctgcgggcgtcgagtcctagcacgaaccccgtgtgcttgcgcaggattggggggcccccacaccctgcactgacttagggtagcaggtctctgcgggctggggacgcaggggttcggcctggctgcgggaagcctccctggatcctgcctctagatgtaggcttttgtagcctgccgggaggcacgttcgttcccggggttcggatctgtgtgcatgcttgtgagcgtggccacatgtgcttatgttttgcgcaaacgtcccccagagcacccagctccctgaatggctccccaggtctcctggagttccatggtgatatcagatgttgtgtgcggcttgcacgttgctgagagtggagaacatatgaaagaaggcgggggatggggtggggcggacaagcgaggggcaagtgctgctcaaatacagtgctggggaaaacggtccaggacctaaggaaaacacccgcgggcgggcgggcgcgagcggcagtcgcacccgtgtggaggagaggttgctgacagatcgaggcgggctgagtgcgcgagcggccggggagtattcccgcgggtcctccggttccctccccacctctccgttcccgaagcccccggtagtgggcggggagggacgggggagtcgtggaaacttcgcccaccgcgcgcggtcgccgcggtgctggccgcgggctggtggccggcaggcggtggcagcagcctcaccgaacagctgaaaccctagacggttttttaactgcgcggggctgctcgcggtgcctattaaacatcctcctggctgggtgtcattttcttgcttctccttttgtattctgatctgcgcatagatctgctgctgctgaaatctagaacaccagcgcgaaaacagatttgaagacaatgaatgcaaatctgtgctcaaagaccatctgccgtggaggagacaatcagctgttcgtagttcgagcgattgcgccccagtctcccggtctcattacggggagggcatttgcgagcgcctggactgcgttcagggcactttctcccctcttgggtctcagatttgagagaccagatcccttaggtgtaggtgagcgctcgcaaatgaactgctagagtttgccgctagaggacacagcgccttgcaactggtttgcctaggctgacaggaagcttgcacttcaagaaaactcggctctctcgagaaagggaccggtgcgcgcctccacctccccaagggacaaaccgcggcaccacgctgcgtgcgcgggattgcgactaggaagtgctggtccgaactgcggagattcgcttgaaaacggatagggggttagggagtttgcggggcgggtgcacggaccgtctctgcacaggccccgggatccagggactggggtcattgatttgggggaaggtagagaaggtaaaccccccgcctctgggttgtgttgactgtggtaccccgaccccagagctctggcttggtcctccctgttggactggaaggggcgggagagccatacagggcgattgggaaatggatcgggtggctagtaaaagccaagtaagacaggagtgtccaaaggaagaagggggtagggagggaaatttgtagggatgagattcactgccctgtttcaactcggcaattctctgttacatgcaggttttacggagaatttcggtcccagcaaaaactgatcacctggagtcttctacggtctctctttataaatctctccgaacctcaagcaactcccccccacccccttcgtctggggtctgcgcccagcggggccaaagccttgagttccttggcagagagtgtggaacagccgtgagcccttcaagacatgcctatgagcccggtgatttttttttcaagggggctttgatcagctgtacctccacgttgccccggaaaggtgcgcagggcacccggagaggcctctggtcagcagtgggcctgggccaagccccaacagtttacccctcaggctcaggttggctggggttaaagggcaaagtcagggtcgagggcaccagcttttctcggcggtaacagctgccacccaaattatgccccctcaggaagcgaatgaattgttcctttctcccagctccctgctgcccgccccaaaacagacggggccgcgctcggcgggcgcccctcctcccagccaaccccccgagacgcgctcaggggcctcggtgccccgctgggaggcaatttgggggagccgtggtcccgaactttgacagagtggggcttccccactacttgccggctgcgctaagggcgccccccgcggcagtgctgctgggagctccagggatggctgtgtggctcgctgcgggcgttgaagttccctgttggccaggctgaagtgcctgcgcgagcgtgaggggacaaggactgccttgggcccagcgtggcggcgtttcggccaacccagttggggttaattgcgtctgtataggttttgggtaggaatgctcgcggagtccgccacccgcgcgaaacatgcgttggttgggggaatgagcagcggcggctgcgcctggagggttgctcccacctctgtcgcctccagctacccccaaacaaacctccttttcgatctcgtgcaacacaaaacctgccccgagctgtgcgggggcctggcaagcgcagctgcggccccgggaagcccaatcccgcgggactgcggagcccacgcgctcctcaggctccggccaactagctcggttctgcctctagcccgggtcaagaaaaatccaaaatgaacactatgattaaaattattcacaatctatttatacaaaactgggggtgtctgtcttttaccctgtccccttcttcatttacccttcccaaatgaccctcacccccgtttttttcatgtttctgtttcacgtctgcaacccagtgcggtatgttcgatttccttttaattggttttaagcccctttgctcaatctcgtccggtccagtcatctgggcgccaagtctctcctcccgatcagaggttcggaaattttacttagaaactgctctcctggctgtgttcctgtccggcaggacactggggtgaattcagagatgtcagaacacacccctaaatacgaccttcaccccctcttccagacacacaccccctgcgccgaagcacagagccagacagtagccggggaattcgattcacagggagagccagtctgggttttataaatggaaaaagtggctgtccccctggcctgtcttcgaacgtgaattttacaattttgggttttttattttttaagctggaacttttactctttgtccgactacaaagaaatagctttacttggcatatcagagacctgccgaatatttaactcacaattctttatgaaatgctttttttaaatatcgaactccattaactctcacaccaaattgcaactttggcattttcttccggaaactagatttgtatgttctataaatgcaaattccctagagagggtgggagaaaagaaactaatcataaatgcacgacaaatatctcagggggactccgccgtcaataccaaacagctcccttataggacaatttgggtaagaagtggattcgcttcttttgttttcgcatagtgaaggagattcagcggcaacagctgcagaaatactgagtcgtggaggaacgttttagagacacttgatgtcggttgtatccaggccagtcggggcactgcagtaagtttacccaaaatagactggaggagccagattcaccgctaccctaacacttggcaactccagaaagtcttcctcctcgtcttcctctcctctgctcctcctccccctggtattctccttcagaaatatccctctttcccatctccttattccgggtgcagaacgagcgaggaagcaaagcggaaaggtcaagagaacaaattctcgcagcagcagcttggggagcgcgggtgaccacgcggaaatagaggcccgggaggtgtgtgtgctgcggaacaggctgtctgtatagggaagtgattgatagcttccacgcgaacctggggacccgatttcccaggtgggaggggtgactttcacgtgaagcccctgctgggggccttgctggggtaaatcggctggccgattacagcccctttcagggaactgtgcacgaaggcggtggcatctgtcatcactatttacggtgcagcgatcagggcaagttgacccgcattaaaaggcctaatcatgctggtctccgtgaaacggaagaccaagaggaaggtactaacgatcagaggcaggacttgcccaggccctttctcgcccttaaacttcacagcaacacttccagtggaatttattgatttgtttgcccccattttacagatgaacaaaatgagggtgggagatgacaagtggcatcccagctgctaaatggggaataaggatcctccccgatcttccacttctaatactcaacaatagggtgcaacagaaggccttcagaaagaaaaagttaaatatgacatttttcttttttctttttttccggcttcttagctcagtgataaccgaagagctactctgaaatgccccccttttcctggtggtgcccgccagccggcaggggaaagcccgagggacctcccagctccttcccggatcgcggcggaggtgtgagcgatgtgttgattattcatatttttaccgagcgcatactctgctgcggccggcgccgccacatttcacacgtacactgacgtacccacatgcacaagcgctcactcggccccgcacgcaagcagcgccccgcgcgcccggggccctcctcggataagggaggggtgacaaaagtctcccgctcactgctgcctacccacccccaacccggctgccttttcctccaggcccccacaaacacccttggctttcagatccaactttcttcctcataatatactagtcaccgcgactcccgcctcccggatttgaggatgggggagactttggcggcgggggtcagctgcaaatatggcaccatctagaatttcattccatttagcactaggcaacctcctcctccaacacacacacgcactcgcacaccatcacgatcacctccacctacactggcacacctcactcaggtggcaagagagaaaatccaggaaagtcacttgcatagagtgcacggatttcaagaagtctttgacggtgcaaactggacttctaatcatgggatctctccaaacacagcccaaggcctagaaattccatttctggctcacggaaccttccacccccaccccctcacctgccgcgagccgggcaatcatttcggggcgccagtgggtccagggcgcacgggacatggcacccacggaaaacctcagagccagctgggaaaacagagatcgctctcctggccgggcagctccataccaccctcgaagggggacacaacttccacttactcttttctcccaaaggagagcagatgggggtcacagggcttgggggtcactgcgttcagacagtcaccccgcgcggtaagtgcttagagcaacgtttatagggcaatgctggcctcgccgcgtaggggtcgctggactaaatgcccagaaaccctcacaacccgtgatgtccactttccgtggatctgaacccgggcaagttcggtcgtttctgttgtcctcactcgaaggagaaactttggtgtccgcagacccaggttagaggctggcatttactaataaggtctctggcatttgttgttactcctctgaacctcggtttcctagccagttaaatgggaatgttattcctctgaatttcagctcccttactggtaaaatggggatatttattcctcagagctttgcttgccttacggataagacagcttaggtgaaagtatctggcacgcagtaggtgttcaataaacgcttgctttccttcagcatctgcaggtgtaagatgaggatgatcacatctgcttatggaattcactgggtcctgagtctcctatggggatgggtttcctttcccccgacctatgcgctcctgaggcagggattctgactcgcttgtccttgcagctcctttgcctggcacagggactggatcgctcagtgggtgataagctttttgtttgttccgcatggaattgcatgtgagaaaagcgctttggaagctgtttggtgcacgcgggcgtcagagggcaccgtaggtcactgagcggggtctcacccagggagagaatgcgacttcattcctaggaggctgtgctgggggctccgcgctgcgcgcggcagtgagtagggcgcaccccgaatgcaagtgcggttcgctgcgtggccgcgtgctgggatggatcgcggaactcgctagataattgaagatctcgaggagctctgaaatggatcttcggtttctacgacaaacccccgtcgatgagtggttcacagagagcttggggagcccctccccgccctgcgccctcaggaagagacgcggctcgcctgacactactggtctctgtctcccgagagccagagccgagctccccgagtggtgctttccagagcccgcattaaacgaagctgggagggagaactgagacactgtcagccaggaggtggctgactggaggctgcggggtgcggcagtggtggcggggggaggggggaggcggtgttaaggggtgaggttccagacttttccattccacagaactagaagctcttttaaaacttgcagcatcttttatgcaaaggcaatgcatgtttattgcagaaaaatatatacaaataaaaacaaaagaaatttgtaaccgcctccaatggcatcaacataaataactgttgctaccatttggatgggttttctccctttattttatgcatatttctatatacagtactctaaatgggagcatagactatatgctgatttgtaacctgttggctcacttaatatagcatattttcctatgccattaaatatttttctacagtaacatttaatatttgcatagtatttccctatccataccataaattgtttgaccagtctattggattggacatttaagttgctcttaattcttcactattataaacaatactatgatgaacatctttgtagcttagtttttcaataactatgattctttccttaagataaagtcctagaagtaaaattgcaaaatcaaaggctttgcatgtttttacaccttaatacagattgacaatttggcctctcgaaagactaaatgtacacttttgccagcaatacctgatattaccccttctggccctcacccctcaaccttctgaatctttgaagttatagtcttatttttaaaatttcccagtttgatagattggaaatgtcctttagtatttgtactttatttatatttagtgaatttccagtaaggggaaattgtttttcatacactttttggccagtgtacatctttggggagttaaatattattttattaaggacgttgaattttaatttatcatatatgttgaaaatattttttccatctttgcttgctggtaattttatttataattttttggtggcagaaatacagatgtattttagttacaatgttttcgtctgcaagtacccaaataagcgactaacagcaatttaatttaagcaataaaatcatttaattatctcacataccaagaagccgggaggtagatggccccaagttaggttgccacaaacaaccctggttcatttgctttgcatgttgagtttcaatctcaccgttactgcctcctagtggcggatacggcggcaatagtggcgcacattcaaggcaggaagcaagaggaacagagccaccagcaggtttggcccagtggattgcaaagtagaagcttttccagaaacagcccttatgcctcctttgccataactgagtcacgtggccatccatagttagacgtttatctgggaaagcaagtgcctccattgtgaagcacttcagggcgggttgagaatggcagttggattaggcagctagacaagcccccctccccacaaacccccccctttttttttttttgacagagtcttgctctgtcacccaggctggagtgcaatgtcgccatctcgactcactgcaacctccacctccgggttcaagcgattctcctgcctcagcctcctgagtagctgggattataggcgtgtgccaccatgcctggctaatttttgcattttttcagtagagatgaggtttcaccgtgttggccaggctggtcttgaactcctgacctcaagtgatccgctcgcctcagactcccaaagtgctggaattacaggcatgagccactgcgcctggccttagacaagcccattttattttatgtcctgcaataggtctttaacttgtgtgtagttaacttcacccatgtttttctttataatatcttttgtgtataattaaaaataaaatttagcacctgttatgtactcataattaaaaataaaactttttaaagcataatatgttcattttgtgttgtttgcaggtaatccttccccattccaagataaatattgatgtatattttcttatttctctattttcattaaaaattttgccctaagtaaatagatttgttcattatggtcttggttcccttttcaacaataaagactaagttttagaaggccaatttaaacagaagattagctatagatactgaaatatcaaaaattttttttttttttttttgagacaggttcttgttctgttgccaatcttggctcactgctgcctccaactcccaggttcaagcaattctcgtgcttcagcctcctgaacgactgggattacagacatgtgccaccacccagctgatttttttttatttttagtagaaacactgggtttcatcattttggccaggctggtcttgaactcctggcctcaagtgatgcgctcgcctcccaaagtgctgggattacaggcatgagccaccacaccccgcccattttattcaaaatattttgatgtttatttatcaactatagtccatctggaatttatttccatttatattaagaggtggaaatcaaacttctgtcactaaactcttaattgtaccaacagcatttattaaataatccttaatttctcccaaaatgtgaaacattggtatgtgtatatatatatatgtatacatatacacatgtacgtatatatacacgtatatatacgtacgtacgtatatatacacgtatatatacgtacgtacgtatatatacatgtgtatatatatatggagagagagagagattttaaaattagaactggaaatttatgacatttagaaactagaaaaaccacatgctttttagtttatgcagtttattttatgtcctgcagtaaaccttgtagtattggctggtcttggtggctgatgtctgtaatcctagcactttgggaggtcaaatgcaggaggattgcttgagcccaggagttcaagaacagccaggacaacatcgtgaaagcatgtctcaagtaaaaaaataaaaataaatttaaaaaaaaagcctgtagtttattcatataggtccaccacaaattttgtttgaattattcctaggtagtttgtattttttttctactgtagttcctgattattgctgaaatatggggaacttgttcatttattacacacagagatatctttcttagctcttattagttgtcctagtttcttaattgattcagttagactttccaagtagacaattatatcacctacttaatgataatttggtctttttctttctagtaaagtaaacctgatttattttacctgtttagtttacctgtttagtttcattgtattagaatacaatggcaaagagtagaagtatcagagatacactttatattgtgtctgaatattatggatatttttataatgtgttattaagttgatgattggtgtctgatattataaagtacagatttatctcaggttactgagaactttgattataaatagatgttgaattgtatcaaatatattgttagcacttattagggtgattatagacttttcctcatctttctattattgttattaattaatatatttactaataatgacatatttttgaatttctatagtaaacccaacatggtcatttaatcatttatgcatccattacaaatttatcagacactcaccttaccagggacaccatggtaaatgacaccaagtccacacccctgagaaatttatactccagggaaaagatgatgattgatttgcaattttctcatgttaattctgtctttgcaggtgtgttgtgtatttactcacctgacatccatcatttattctcacctcctcttctgtgcctttctgtcctggagatttacttctttggtgttctgtggatcattttagaaggccctgcttgaagtttgcctctccaactcttccaacaattttacaaactccacacccccttttttaaatctctttttctatgatgtttggaagattttctatttcttatgccaatctccaactagcacatcagattttggtatcagggttatataagctctgtaaaaataatttctatgattttttaaatatacaagtttagtttaaatagcataggatctatattttctttaaattaacagaacttggccaggcacagtggctcacacctgtaatcctagcactttgggaagccgagatgggaggatcacttgagaccaagagttcgagaccagcctggtcaacatagcaagaaccccccgcccccccccgccccattctctattaaaaaaaaattaacaaaactttcccataaaggctttgataaattatctaatttatttgatggttaatgatttattcaggttttctatcacttactgagtatatttggataatttttattctcatataaaataatctatatcattaatatttttaaatacattaccatagagctgtaccttgtattctgctataactttaattttctgtatctgaaacaattttttcccattgccagagttgaatattttcattttgcatcctgttttatttatttatttttaatactttaagttgtgggttatatgtgcaaaacgtgcagttttgttacataggtatacatgtgccatggtggtttgctgcacccatcaacccaccacctacattaggtgtttctcctaacgttatccctcccctagccacccaccccccgatggacttggaaccaacctaaatgtcctgttttatttttattcctccagacttttctaatttatactcccatcaacagggcaccagaaacttggtattatctgactttgtaattttggcaaatctgatgggtataaagatatatcttgctgttgttttaatgtgcatttctttgcttgctggtgaagttgagcatctcttcaaacgttttttaaccatttggatcccccaccaattaaccacttattgatagcatttttccactggattttcagccttggagatggttgttgctgctgcttctgctgctgttgatgttgatgattggcggaaggattttatatgtttagatgttaattgtcagttttagatgttacagatattatctcttaatctgtcatttgtctataacttggtcagtgttgtcctctgctgattagcaatgctttatttttatctggtcaattccgtccacttttgtgctttggagtcctacttaagaagtctttctacacctcaaaattacacaaaaaaatccaacacttctaatttcgtcttttacatccacatgtttaatcccatgcatatgagattaacttgtgacattgtctaaaatagtggtccagattctgttttctccattaaatgagctataactgaactattataccaccaaatgccttgtagcatggcaagaaagaaaattgtcccaaatatggtctgggacacaattttctttatgtatgtgatataatttataattccttctgggaaataattagcatccttgtgtgattttttggtagactttattgagctcaagagcatcttctgagaagctatcagtcttgagaagagtctgataacattaactggcactgccttattgtatttttctacaacctcttcttcaaagaaaaaaatctgcaatggctggctcaggaccttctttccccagggcaaatctgaaataaagctttgacatgagcctgtaagaattttttcagaaagggtactttaacaacagcctacatagtcttcagctcttctagatagaactgaagactgtatggatgaaccttcccctccatccactcacgcctgtaatatgtcttagagaaattccttaaagtttattatatgagaatagcacctctgtctagtttccagcaataatgggcttttaaaaattatatttctcagtatttgagaagtttcttggacatgacatgtggatattatcattttttacaacaatatcactgcctccattacagttctgtttggtaaaacttcccaagaattgtttagaatctttaagtgttaattcccagtatttttactctcattgaaatgacaatttaagttgtttaaagtgttattttcccagtagttctacaatggttcataaatgatctctttctttaaactgccaattctctttctatgtctaaggactttacatattcagtgctcttcctacagaggggagtgaatttgaatatttggggtgagctacttaacatcagcatgcttcactgttttcatgtataaaacataatgatgatatagtttagaaattttttattgtttttcaggtaatgggagttgagactgagtcccagatggatttttattcagatcctccaggccttaatgaaaaaagaatcagaagctttaggttattgtgcattttacttctctagatttaagctccaatgggctatggagaacaggaaggcagctacaactacaagcagccgtaccagggagcttcatcttcatgtcggagggttttgttttttttttttgagatggagtctctgttgcccaaagtggagtgcagtggctcaatctctactcactgcaacctctgcctctcaggttcaagtgattctcataccttagcctcccgagtagctgggactacaggtgtgcaccaccatgcccagctaatttttgtatttttagtagagacagggtgtcaccatgttagccaggctggtctaggactcctgacctcaggtgatccacccgcctcagcctcccaaagtgctgggattacgggcatgagccaccatgcccagcccatgtctgagagttttatctttatatttcttaggacaacctaatgttaactgcaacagtgatattttatttagggttcctctgccctccttagggtcaatctctgtagcacccataccgtgtttaggatacatcccaaacagataatattatgtgtgtcagagtaggccctcaccctgagcctctccctgtgcccagtgcacagctgggaggcacaggtagaactcagctccccatgccatctccaggtccgtctgctctgagttagggcatgctggtggagtgactcccactggtccctgggtagctcctcatctgtagaaaatgcatgaaatgaagcaaaggaaacacctgtctaggcagaccctccccttcattgatttgtgcctgtaatatgtcttggagaaattgcttgaagtttatgatttgagaatggcacctttctctagtttccagcaataatgggcttttagaaattatattcttttagaaatttcaacaggaatttccagcatggtctcagaggattggaatctcatattcaactctgtattcccagcacctagtaaaatgtagtaagtataaagaatacatctgtgatgaaaagatgaattagtaggatagtcacataatttatagtctaaatcaggatccttttgagaatgaaaggagatattggccaggtgggtcaacagagtaacagaagtaaaacaggacatgtgaaaacatatccagaaaaccaggatatgtgatcaccctatgcatagggaaacagagaagaaagagaagtgatggggtgaaagaatgatagagaaaaaatatgcctcagctgggcacagtggctcacgcctgtaaccacagcattcaggaggccgaggtgggtggatcacttgaggtcaggaattcaagaccaatctggcccacatggtgaaaccctgtctctactaaaaatacgaaaattagctgggcatggtggtgcacacctgtaatcccagctactcgggagactgaggcaggagaattgcttgaccctaggaggtggaggttgcagtgatccgagatcacactactgcactccagcctggacaacagagcgagactctgtctcaaaaataaaaataaaagaataataacaatatgcctggattccctgggaaaccaactcagagccacagactggcatgcaggaagtttactgtggactgctcttgtcaacagtaaataagagggaatgagagaagtcaggttgggcagaggaagaagttaactgtgatgggccagagaaaactgaaatggggatggacctgcagtgaaattccaaatcaaggcaagaagcctaggcctttgtactcttgcatcaactggtcacaggatgtgagctgaccaggagaaggcagcttaaccctgggtgaggcagcctcctttcatggaggtcagttccctcctagggaggcagctgcagaccttcaacagccaacacacccagcacctggagcaatgagtgctagggtcccaaaggagcattgggagggcctactaaagtatccactacagtccaccccttgtgctgctcaattacctctctcatggagcaagttccccccaattctgggattcagaatggtctccttttcaagggaaacatagaaagaagaggaatgagtcaaacgataggcctgctgctatggctggtctcaaggctacaactgacacacatcatctccctccattctaggctccctccaccctcaaataacatttctaatcccatcactttgggaggccaaggcaggtggatcacttgaggtcaggagtttgagaccagcctgaccatggtgaaaccccatttctactaaaaatataaaattagccagacatggtggcacatgcttgtaatcccagcttcttgggaggctgaggcaggagaatcacttgaacctgggaggcagagattgcaatgagccgagattgcaccattgcactctagtctgggcaacaagagcaaaactccgtctcaaaaaaaaaaaaagaaaaaaaatttctgcaggtcagagttgcccacttacctagtgagtgactcagaatgtcatccatgagaagtttgagcctctggagaccatgctctcagactgtggctgctgcacttttccagttgccatcagaattgggcagggaggtaccaagaaatcacccccatttatcacctgggagccaatacattcctccttctccgttacataacagcaaacccacgtgctcccagtgatcaggggcaaccatgcaggtcaggatgatgacacctttatttggctggtggtctcttagcacaagaagcctagaatagtctcacagtagcaatagcttaaagtttaaagggattcttgctatgtctcttggtggaagtatttccttctctagaaaccaggacctctaggcccacctagagtttcagagaaaagaagcttaagttcctcacaggggtcactgggaatgaagaccatggggccactcctgcttccatgccatgttttccagccccatgtgttctatctattgggaacgtagcaccacataatggtcattgattagagggcatactgagtcctggaggatggcaccttaatcactctataaggccagcagctctggatggtggaatatgcaacagggccagtgggttccatgctcaggcacccactgccatgcctactttattggaaagtaagtccctggtcagatgtgatgttttgcaggatcctgtgttggtggatcaatactctgtaaacaatcagagagctgtgctggttttagcagtacaggcaggaaaggcaaatccataccccaattatgtgttccttctagtcaagatgaatcactggccattttctaccaagtggcagtttggtctgcttgagggctgctgctgtactggaggctcagtgtgggtgtctgttgctggcaggtgggacatccggcagtggcagtggctaggtcaaccttcatgagtggacacttatgctattgggcccatgcatctcttccacaatggccacacagttcatgtacccattgtgtaagccctgtgggggctgaatacagaggctggttgatgacaactggctgagtcgtcacatctgcttggttgttcagtccctctttccaggaagattttctcaggtgtgcattcacgtgtgatccagggatcttcacctttcatacccactccattaggtccaaccacaggcctctttcccagcactctttgttctcaatctttctcctcccaagcttctgagaaaccagccagttccttctgcctacaagtccatatatattcttttttttttttttgagacggagtcttgcttggtcgcccaggctggagtgcagtggcgcgatcttggctcactgaaagctctgcctcccgggttcacaccattctcctacctcagcctcccaagtagctgggactacaggcacccgccaccatgcccagctaatttttttgtatttttagtagagacagggtttcaccatgttagccaggatggtctcgatctcctgacctcttgatccacctgccttggcctcccaaagtgctgggattacaggcgtgagccaccatgcctggcctattcttcttttaaggacctccttttttctacacacgaaatggatgcccaggtgcactgctcacagcattttctgttgagaggatttctcctgccagtcatttagggccaatcctgagtggggctgtaaggaagctgcagtccatttttggcttgtaccacatgccatgctgatccatctgtgagccacacctggcctttttcctccccaatcaactggtcataaggaatcacccaacctcatgcagccagaggcatgagttcaggagaggcaatgatacaaaaacagtggtgagttcagtggaggtttggagatttgggccattggcccatgcagctttctgatgctctgactttgtttgggcctccctggatgtactacttccatctcaaaatatggtgctgcgggtctctccagatatatgatttggtctaacagaaccaagctcataacaggcagtctgcctgaaggatcacttcatgtgtcatggacagttgcttcatctctctagggtctagaaactttctataaattgtttctcaaacacataattccctgctatagatggcattgacctcactcctaaactctaagggtctgtattgtgattcttttatttgagattccataaacatcatgtggcaacttttgactccacagacacctctaattccatagggtctgttggattataaagcccaattatcagcatagcttgaacctcagcctggacctgctatagagctctttccagttctgggtactccagagttacagctggtgggagagtggtattccccagtgtggaatatgctgctttcagaccttgaggcccaccaggcattgtgcttccttcttagtggtaggaggtgcaagatgcaacaatctgtgctttactttgaagatgttccattgtgctccagatcactggacccttaaaaacttacctattgtggcaggtctctgaatctttgttgggtttatctcccaccctctagaacatgtgtctcatgaaggccttcaactcacttgccacatcttgttcatctgtctgatgaatgtgaagtcattaatatagttggccaatgtgatatttgcagggatgtctagattgtccaggtctcttcagcctacatatgacagagagtgagaaacataaccctggagcactactgttaatggatatactgcttgtcccatatgaatgtgaattgttcctgatcctcctttctaatggcaatggagaaaagagtatttgccagattaatagctacatactagggctgaggctatcttaaagtgctctagcaaagacattatactctgtccagtgcagcagctggaactggggctactcttttagtgtgtgattgcccatattcatcccaaagggtgtctggtttctgtaggagctgggctgatgcaattatctagggatgcaatggggaccaccatccttttatcctttagctctttaaggatggcattactctctcctcccaacccaggatgtgatctttgtttagatttgctctcttggccagaggaaatgtgggacttcagaggctgctgtttggctttttcccaagcatacatactgccatacctctcccccacaggccagggaaccagtgtgggagttcttccagctcctaaatatgtccattctcatcaaacatccagaggcaagggaggtgacaccagatggatgatggtgagccactgtgagccacacctaggacagaactccacacattaccaggctccacacattaccaggcccctcttgctaacagggggtccatactgacacctggggcacccagtcaatgccaacttggaacctgtgtccaacaatcctccaaatatctgaattgtcacccttccccagggaacactcatgtaaatggccatagatcttagaggactttggccgtaattatacacttgtcagagagttgcagggtctcttcctctgaggacccttcctctgtttcagtcagtaggttcccttcctcaacaggttcagtcagtaggtctgaaaattggctcaggtctagaaactggacaaggagcatgacttccatctggatggctgctctcagcctccaatctcctctccttggtttctgtttattctgcaggttgaacagtacccttgttggctactcatctatcttggccctagggatccccactgtgaattcagggatttggaggctgataagagacagagatatgaccactaggtgatagtagcacacaatgaacttgatttcagcaacactttgataggattgtgtgcaaagggaagcccttcccagaatgaaaccttccagaaacaaggggccatgcagaaggagaagaaggcaaaagaattcaggagggaaaggggagtggcagagaagcctcatgtgtctaggcaatgtcactcagggagtcctgattggagagctcccagtggcagcagtggcttagggtcttttataaccccagggcttgtcttatctatggctagcaaacattggatacagatattttgcaaggtaggcaaagcagacagcctgtaaatagctaaaaatctacttactggttctctatttaaagcaacaggatgctttgaatttaaaaaaatttgagtttggcaggcttttgagctaatggtcccagcctggtgcaaagaagcaaacaacgtagggccaacctacaggggccatctttggctcctctgtataacatcatgttctattagctgtctctgtagctctccctcatcaagccactggctgccactctgatttagctccttggtatagtaattgccacaacattgcctctaatggctaactgcttccacttggtatctgttgtttagggatcctatcacccccattgctatggaagcccagtcgcccaacagcatctcctgccatctgccctggcctgcacaggacagccactcctgaatttctcaatgatgttggtgcccctctgcccagctcatttcttgttgctctcatgaacagagtgtcctctgggttctcctgaggaaaacagttggctggtgtttcccagctgtaggtagcattctcacttaactgaaatctttgagcccttcttttctgtctttcatgaaaattctgatatttctaattcatttagtgtcagccactaagcgacactaatggctgacactaagcttgtatacaagtttctccaaatcatccttagtgtgttagcaacatctcctaggatcccagagtcctgaggtgccagggtccttgctaaggtttagtaatgcagcatgtcccatatccacaggctccctttacccaacttgatgttctgccccctctacatctggcatcctcaggacccatccccctacagtctctcctggctcttgctagaacatttttgcaagttccatcaatccctttggggaacagtcctcttcctatcttagtgggtcctttggggcacagtcctcttcctctcttagtgggtccagcacttccctggccaggtaatgttgggacctgacctttgttattagtctggtggtcataactggaggtggcctcagagcctgaaagggacatggtatggttcgtctctgtgtccccacccaaatctcatcttgaattgtaatcccatgtgtcaagggaggaaccttgtgggaggtgattggatcatgggggccgtttctctcatgctgttctcatgatagttctcatgagatatgatggttttataagtgtttggtagttcctccttcctctctctcctgatgccttgtgaagaaggtgcctgcttcttcttcaacttctgccatgattgtaagtttcctgaggcctccccagtcatgtggatctgtaagtcaattaaacatctttataaattacccagtctcaggtattctttatagcagtgtgaaagtggaccaatacgggcatgggttgtcttgaagggtctagaggcctgtgcattatcttcaagccattggaaagtgctgtcttctaacagggaggagtgggccacttcttcaggcccagaatgttcaaggggctctggatattcaagacattcaagtgaagacattgtcattccatctctcaaggtgtcatttcagccaatcagggccctggacatctggatctgtcctgggcatctgcaggatatgagtgtctcttgatttgctgccagaggccctctggcttctgcacttagcctttagctggtgatgaatttccctcaggctttcatggtcttctctaaggcctcttttgccctcagcaacagtgatccacttctgcagaccttgtaatggactcactgttatggactgaatatttgtgtcccactacccactcctaaattcgtatgttgaagccctaattcccaatgcgatggtatttggagatggggctttggggagataatgaggtttacagggaatcatgtgagtggagtcctcgtggtaggattagttttcttataaaaagaagccagagagtgcttctctcaccaccactatgtgaggacacagcaagaaggcagccatctgtaaaccaaaaaaggagccctcactagacacggaccatgctggcaccctgatctcagacttccaccctccagaaccatgagaaataattgtttgttgcttaaaccacccagtctatggtattttgttattgcagctgaagcctgctaagacattggttcacccaccagtaacattgctctcaccatttttcctaccagaaaaattagcaattgtataactgcaataggacggggactctccatactccacctgccacaaacattatggtcctcactgccagccttccagcaggtgatctacctacctctcaagccctgtttttaggggttttttcctaggacctctcccagtaccaaatgttacacattgggttcccagagaaacagaccctgggactctaagaatggtgagaacaagcactccgttgggaagtgctctcaaaaccaaagctggtgaagaagcaagagaagtagacttgggtgacaagagaagttgaactgcttcaaggagtgctggagctgggatgacccttcatagaggtcctgaactaaaacaaggggcctggcctttgtagtttcacataaaccagtcatggggtgcaggggaggaggcacacacttgggtaaggtggcttcctttgaccaagcataattcactaagaaggggatagctgtgagctaccagcagccaacactccaagcatttgggagcttgaaggatggcacaccacagtatcaactgcagcctgggtcacagcttccctgccaagaaagcacaaattcttcctcctcctgttctactgggaattgccaggggaagtttattagcatatcctctaagagaaaacacgccagaggccaggagtagggggatggcagggacacatataatcacctgtcacacctataatcctataatagcagcactttgggaggcccaggcaggaagattgcttgaggccaggtgttcaagaccagcctgggcaacatagctggacctcatctctacaaatatattttaaaattagccaaggtatggtggcgcatacccgtagtcccagctactagagaggtaaaggctagagcaagcttgtctaaccagtggcccataggccacatgcagcccaggacagctttgaaagcagcccaacacaaattcataagctttcttaaaactttttgagattttttttttttttgcaattttttttagcttattagctatcattgccattagtgcatgttatgtgtggcccagggaagccaaaagattgcacacccctgggctagaggatctcttgaacccagggtttctagactgcagtgagctatgattgtgccactgaactttagcctgggtgacagggcaaggccctatctggaaaaaaaaaaaaaatgccctaaccctgcccttgggcagttatcctgtttgtatctctttcttcaaacttcctttggagataaccacttctcttccacatattcctcggcctcagccttattcctcatctcttcccttttcttttttttttttaaccctctcatacccttgttcctaataaacattatttggttaaagacaagtgttatgggttgaattttgactcccctgccccacttcctgacgtggcgaatgtctaaatccctagtatctcagaatgtggccttatttcaaaatatggcctttgcagatgtaatgaaagtaagatcattggggtgggccccaatccaatatggctgatgtccttacaaataaaggaaagaaatgtagacactgagaagcacacaaacacagggagaatgccatgcaaagatgagggcaagagcagagtggtgcttctgcaagccaagaaacaccaaggactgccagcaactgccagaagccaggcaggaggcactgaacagattctcccccagacctcagaaggaaccagccctgccaatttctcgatcttggacttccagccaatatgttccagacagtacatttctgctgcataagccaccagtgtggtactttttttatggcacccacaggaaatgagtacagcaagattgtagcaaggaaataaagtcaatgtagagagtgaggaggggagcagattggcatgttcccccagtgagtggctctatcaaaaccagagggaggagcacaacttcctcaattttatttatctggtttgaaatgcagagtaataggtaactgtgcccagggtgtgtttgatagagtgggctccccagtgagtctgtggggcatcactctgcgatattctcatgctcctgagtgccgtgtgagctgtgggaccctcaagaatggaaagatttatgcaaaagacagaaaaggaagggcagggcagggccttcacactcatccaaaactctctctctctcttttttttttttttttttgtaaaggagtcttgcactgttgcctaggctagagtgcagtagtgcgatctcggcttactacaacctccacttcccgggttcaagcaagtctcctgcctcagcctcccgagtagctgggattacagggtcacatcaccatacccagctaatttttataattttagtagagatggggtttcacaacattggccaggctggtctcgaactcctgacctcaagtgatccacctgccttagcctcccaaagtgctggaattgcaggcataagccacgacacccagacttttttttttttttttttaagtaaagacaggatctcactatgtggcccagactggtcttgaactcctgggcttaagtgatcctcctgcctcaacctcccaaagtgctgggattacagccatgggccattgcacccaactccttcttatcaagacatctgttgccagcatgttactaccttggagagccgagtcctcagacagcactaagtgtggagtttgcctgcccaccaagttcctcaactctctccaccattcagtgggtgacgttgcgggtagaggctctatgaagtcaagagccagtacaagcttttcatcatgggaatgagaaggtactggcatcgcctcagctactgttctttccacactctccagcttctccagataaaacacagacacagccacataccggtgacagaaagaaccacttcttagatccttatttgttcagtaaccaagaagaatgggtgacattgcaaagcacagaaaattgagaataaacttaagttgtgtgtgggttgtgggttctaatgttggcagagcacttcactttttcatctattatcccatcttgacttcacaatagccacataagttacagaaggaagaatgattcccatttagcaaatgaaaaaccggatcataaagaaattaaaagggtatgtcagacctaaacaactagcagaactaggctgaaagagttgaactgttttttagatcagcaattctacaccccaacaatgggtcacgatacattgtattatgaaataatggcttccgggattcatgttaaaatgtttgtgctttctgtcaacctaattgatgtcagttagaaagataagaggagaatcggtaatttttctaaatctatgattccttaaaggtatatttggcatttaaaacatatatatccaaggcagtttttatttctaaacattactgagcttttttttttttttttagacagagttttattcttgtcacctaggctggagtgcagtggcaagatctctgctcactgcaacctccgcctcccgggttcaagagattctcctggttcagcctcccaagtaactgggattacaggcacccgccaccatgcctggctaattttgtatttttagtaaagacggggtttcaccatgttggtcaggctggtctcaaactcctgacctcaggtgatctgcccacctcggcctcccaaagtgttgggattacaggtgtgagccactgcgccaaccacattactgagcttttaaaaggcttatgtgtcaaattttgtctgtagcaaaaggtataccaaaaagaatatttgatgtttaaaagataatatccaagtcagtttcgatttctaaacattagtaaggttttaaaaagcttatgtgtcaaatttttgtctgtagcaaatattgctaacccatgatttttaaaaagcagcaagagaactttcagttatgtagtaacctgccctgtgtcacttctgtctttgcaactgctgtgtgtatgtaacagaaaaatgtggtcattgggagttcatggagtctatgattctattttgagccttttccaaaggtaatgaagaaagtcagcatttcttcaaactgccccagcagatttgactgactaataactgacagccaaaagaaacacaattttgttccagaatggatcagggaaaagattcccctcaaggcagtcatgcaaatacaccctggcccacaatcacatgtcctagaggaaatagggaagtggcgcaaatatattttaaccaccgttgaaggcactacacagtatttgtcccatatttcttctccactgtgtccttgtagcaacagtcatgactcttgcagactccaaaaatccattggctagccacattacgttccgaaacttcagcaaagtagttctcacatatagtttaggtaacagatgcccaattctaggtgtgggtagggggatggatggtaatcattttgaactaccatcatttggtatttatttaaccagtgtgaaaaaatcagagtcaattagagttatttaaataaaaagtttgacaatgacatttagtcatagtaaagatcagatggcagtcaggatggttaaaacagcatacgcaaggagcccacagtcctggatttgaccctcgctgtacctggtagttttcttttccaccaatattgctgataactctccagcccttctgccacctgaaaatgccaagtatctgggcaagaggggccagggaagtcaaagcaaacccatcaaggtgcacaccctgctagcagtggcatcttcccataccacaggaagcagagatcagaattttttaacttttattttggttcaggggtgcatgtgctgatttgttatacaggtaaattgtgtgtcatgagagtttgctgtacagattacttcatcacccaggtaataagcatagtactcaatagttagttatttttgtttttgggtttttttttttttttttttgagacaaaggtctgactctgtcacccaggctggagtgcagtggcacgatctaggctcactgcaacctccacctcctaggctcaagtgatcctcccacctcagcctcccaaggaggtgggaccacaggtgcatgccatcacacctggctaatttttgtatgtttttgtagagacgggttttcaccatgttggccaggctggtcttgaactcctgagctcaagcgatccacccacctcggcctcccaaagtgctgggattacaagtgtaagccaccacgtcccacttatagttagtttttcaatcctccccacctcccaccctccaccctcaagtagaacccagtggctgttgttcccttcttcgtgttcatgagttctcatcatttagctcccacttataagtgagaacatgcggtggttttctgttcctgcattaatttgcttaggataatggcctccagctccatccatgttcctgcaaaagacaggatctcattcttttttatggctgtttagtattccatgatgtatatgtaccacatttcctttatccagtctactgttgataagcatttaggttgattccatgtctatgcaattgtgaatagtgctgtgacagaggtcaggatctttaatgctttatacctattgtaggttaagactatataagaacttaaatcttccctatctgatccacaagaggggcaggaagtagaaacatgggggtgaccactgtgcattaaggggcaatgagtagttaagccacactttccaacatggtagccatcagctacatgcggctttgagcatttggcatgtggctcacacaactgagaaactgaatttcagtcttatttcattctcatcaatttaaatttaaatagacacctgtgatgggatagcattgagtttgaaaaagagaaataacagaaccagcaaaatagttcatatttctcagagatctttgatgtagagtttctcatttgagtctcataacatcacatgttgggcaggaagagcgggcaatattatctgcatttttttttttttttttttttttttttttttttttttttgagacggagtcttgctctgtcgcccaggctggagtgcagtggcgcgaactcggctcactgcaagctccgcctcccaggttcacgccattctcctgcctcagcctcccgagtagctgggactacaggcgcccgctaccacgcccggctaattttttgtatttttagtggagacggggtttcaccgtgttagccaggatggtctcgatctcctgacctcgtgatccgcccgcctcggcctcccaaagtgctgggattacaggcgtgagccaccgcgcccggcctattatctgcattttaagcagacataaaaaagataaacggattcatttatagtcattaggtagtttatgagaaaagcatgcctccaactcacaatttctgacaatccgctccaagctttatccatgctatctgtataataatgatgacaataatgcattaatggcataattaatattatggactgcttgctatacatgaggaagctcgttacatctgtggttctgtgcttcccagccgtttccacattgtggcactcaaagaaaatgaaaccagagatacggcacaccagggtaagctggggtaaactatgcccctccagtgtgccatctgaaacaatccattacactcaatttacattttataattaagacaaaaataaaatgcagagtaacagggtagatattcaatgttgatcttgtataaaacttccaaatgtttcaaactagagcttgcttctttgaccatatctttttaatgttacattttacgctggaaatggctatgcatggccgggcacggtggctcatgcctataaccccagcactttgggaggccaaggtaggtggatcacttgatgtcaggagttcgagaccagcctggccaacatggtgaaagttcatctctactaaaagtacaaaaattggccaggcattgtggcaggtgcctgtaatcccagctactcaggagggtgagacacaagaatcacttgaacccgggaggtggaggttgcagtaagctgagatggtgccactgcactccagcctaggtgacagagagagtctctgtctcagaaaaaaaaaaaaaaagaaaaaaaagaaagaaagaaagagaaaaaagaaaagaaaagaaaaaagaaatggctatgcacaatccctgacccaaatgttcttaaggttaatcacttgaattcttggtgttcacccttggagagaaattttgttcactcaaataggtaacacaatctttataccatttttacaaccattcagaaatgtacactttgaaataataatctaaataaattatagctaaagaaccataaagtctttaactggcaaatataactttggaatttttgtaataatgttggctgtgtttgtctgtttgcattgctataaaggaatacccaaggctgggtgatttatacagaaaagaggtttatttggctcacagttctgcaagctgtacaagaagcacagcacctgcctctgctcctggtgaggacctcaggctgcttccactcatggcggaaggtgaagggaggaggtgtgtgcagaccacgtggcaagacaggaggcaaaagagagagggggagatgccaggctcctttcaacaacaaagggtgagaactcactcattccctgacctatgccacagcactattcacaatagcaaatacatggaatcaacctaaatgcctatcaacagtagactggataaacgaaatatggtacatatataccatggaatactaaacagtcataaaaaaaagaatgagatcatgtccttgcagaaatatggatggagctggaggccattatcctaagcaaactaatgcaggaacagaaaaccaaataccacatgttctcacttataagtgggagctaaatgatgagaactcatgagaatggcattgagcagttcatgagagatctgcccttatgacccaaacacttccctgttgactccacttccaacactggggatcaaatttccacatgagacttggtgaggccaaacaaaccatatacaaatgacatgtctacacatgcaacatatttatcagctggaaaggtaagaaaagattcaaagagctactctgaaatatatattttgaaaacctatcttgataagatgaaactcaaaagactttcctagttttcataaatataaggtacaaactaaaacatgttctggcacattcatggcatctataaaatattaagcatgaaaaggcgaccagagttggtgatttttggcttatgagcagcagaacctcatcaaacttttctcaaagaaaatcttcaaaatcatgatgaaactctaatttgtagagtgtatgtgcattttgggggggtggtcaccctgcagctcgcttagatgacactttaaaagggcacatggaccacagactgacaagcatctgatttacaaagccagaggttttgtttgtttgttttgttttgtttttggagtcaaggtctcgctctgtcacccaggctggagtgcagtggagcaatcatagctcactacagcctccaactcctgggctcaagcaatctgcctgcctcagccttctgagaagctgggactacaagtgtatgtcatcattgcccagccaaggcagaaatttttgactctcacctggaactgggcataccagggatacctgtgtcccctgccaggctacctgcaggacacctgtgtcccctgcctgtaccttgggcacctagagcataaatgccatgtggtccctgggccctttggctaggagggacagaggagcattcagcacctggctgctgtcatagatttcaggacctcagcctgcaggactcccctcagcacactgcagcgaagccagtgcctacgtcacttgtcatgctcagtacctgcaggtagggctggctttgtgggcatgcaaccgatgtgaccgcagagagccatgtgctcagaagggccttgcagttgtttaatgctctgttgtcaccgacttgaaattcctaatgactttttaacaagagaccctgcatttacttttcacacttggccccataagttatgtagctggccctcccagcactgctcatcacctaaaactggtagctggggccttgtagcagaccctgtccccttggaggggtgcatatttcacagtaaactgcacatcagcacataggctgggaagctctgcaacatgtcatttaatcctcatgacaatcctatgaggcacccccattctacagatgagaaaatgaagacttagaatggccaagtaacctccccatggccaaacagagtcagcaacgtttgctgggcacgcgtcatgggagcttttactgacttggacacaaccctgtgaaagcctgagataaggcatgcagatatgtacgcactctgttagattcaaacacaactgtctggctcagggaccgcattccgaagcctgccaacttttagtcctgggcttcatccagtgaatttcaattaataatactagaaaaagtagcaaggaagacgacatgtgtgttagctggaaatgtgagaaaagattcaaagggctactttgaaatacatattttgaaaaactttcttgataagatgcaacttgaaagattttcctagctttcattaatataaaacacaaactaagacatgttctggcacatttgtggcatgtctaaaatcttaagcatcaaaagatgaccagcatagacaatttttggcttatgagcatggaatggcttgtccagcagctttccggggaagggaccgcagggctctgacccaccagtggcagcctctctccacaccaccccagcacacacacccctatatccactgcccacatctcagagtcagcaacgtttgctgggcgagagttgtgggagcttttactgacctggacacaaccctgcgaaggcctgagataaggcatgcggatatgtatgtaccctctagccatccccttgcacacacacacttatacatacatgcatacacatgcatacacacatgcttacacacacacatacatacaaaccacatgcagacaagtacacaaaacacctacacacatacatgaacatgcatacgtatgtacacacttgcacgcacgcacacacacacaattctggtgcaggccagccttccatagggagctgtggtcagctcagtcgctcactgcagagctcagtactctctgaccattgctccctacaaaaacaaactcccggccaagtttggcctttctttcatgcatttaacttccaactgaatgttgttggacagactcttggacttgacagacagcaagtgtgagaagctcatatcacctcccctgtgaatgctgcagatgtactgagtgtgggtcattggcatggccaccgtcagaggcccgagccaccctgtccctctctgtgcagccctaagggaggagcgctcggtgcaggctgtgtggctgtggaggacttcgttccctgctctgtggctccgagtgaacctctgctctccaagcagccccctctcctctgggctgttgttcaagcctccaggctctttgccgaactgctgagacttgagggaacaaaggcttttatgacaagttttattagtgatgcctcctgtgctaactctctgagatgggtcaatgctattaaccctgttttacagagaggggaagagccccagagaggtcaaatgcttccctcaaggtcatgcagcatgtgtggggcagaggtaattagccccagcctgtctgttgggccaagggacaaggagggtgtgcgatgcaggggtctggggaggccactcttaatgatcctggaacttggacttcaggaaaccagagatgggcatgggggcagcatccagcacctttgctgctgtgtgacaccctgccccctgccctgtcccacctcctgtcacagcccccactgtcttcactgctgtgtgacaccctgccccctgccctgtcccacctcctgtcacagcccccactgtcttcactgctgtgtgacaccctgccccctgctctgtcccgcctcctgccaccagcccctactttccttttgctctggagaatgtctcaatgcaacaatgcaaaactacaaaagacaaatagagctactttggagtgagggtagtagatcaactgctcaaatgtagctaggttgtggcttatcaaaaacttcagtagtttggccagggctggtggctcatgtgtgtaatttcagcactttgggaggcctgggtaggaggatcacttgaggccaggagtttaagaccagcctaggcaacatagtgagagcctttctctacaaaaaattttaaaaattagccaggtgtaatggcctacacctgtaatcccagctactcaggaggcgaaacaggaggatggctggagctcaagtttgaggctgcagtgaatcatgattgtgccactacactccagcctgggcaacacagcaagaacatctctctaaaaataaaatttaaaaaaaaaaacagcttcagggagcttctggaaccataagccagagtccaaaggcagaacaagtaagaaactggattatccatatcttgattttcttccaactgataccagaacacacaggtctccccagctgaatcgcttgccccgagagggaggggtgagggatgctgcactgcccactctaggctcctctctgccagttcccagcactttgtatgtggctggacacacaggagaggcttgtacttacttgtggaaaggaaatgaaagaagaaggccaagctaagactacagacacgcaaactgggaaaacacaaaaaccaaaggccacaaacctcagctcagaaagcaggtcccctcagccaaagcctgtgtttatgcctggccctcccggggagactgacaactggcaaggctgcaagcgtgtgccggtaacggggcatcctgggagggagcccggccctgggtgagcgccgctgagcttgtgaatttctgctgccagaggcacgcgcctttgccaaatgcagctggcccctgccagttctggaggttcccaggaatagacaggccccagattcacaggcttatggatgagcacataaaggagtcaatgggagagccatctatggggggaccttggtgtcttcctacttaaaacactgcccctcctcatcctcctggtctttctgcctgaggatcccactcttcagcaagtctttatcctacaagccagaataaagctttattttccagctgacttgaataaggtttctgttacttgcaaccaaagaaccctagtgattcatgtcccaggattgctgggaggtgcaattgcacacacagagctcttagcacagtatctgatacatgggaagcactcggtacctgcccatcatcattgtcttcagtattattaggattattgctgttaaatacatgccgatgtatcaaaacaaactgcatgttgaccagttctaatcctctggctgtgcacacacatcatcatttgctttagctaagttccaccttcctctcacagggcccacctcagatcaatccgccccagcagcccttgagaattactgtgcccttgccaacctctctctgccgaactctcgtccttccctgcttcctagttttacctggtgtggcatataactgtgatataatcacgccgactggggctgctgcccacagctgtcgagttggacacagcaaagccttctctgctttgtgggatcatcctgggtgttccacctgggctttctcttcccacctagaatgtgagcatcccatggaagcagagcccacttgttcttttcttttttaaaaacaattgattacttttttttagagacagggtctcactctgttggccggctgcagtggtgccatcatagctcactgcagcctcaaacacctggtctcaagtgatcctcccaccttagcctcccaagtagctaagaccacagatgtgcaccattaggcccagctgttttaaaaatgttttgtagagacagagtcttgctatcttgcccaggctggtctacaaccccgcctcaagcaatcctccttccttggcctcccaaagtgatgggactacaggtgtgagccactgcaccagctgtattctttcttttgtttctctgtgagatctagtgtgatgctgaacacgtggcagaaagaaaactgatatttacagagcatccaccatgaatccgacaccaggcgaatgctttacccatgtcctcacattaactgtcacagcagttcctcgacaaggtcattgttttctatatccctcaggccacaccagcgtggcaataaaaatagtcacaatgaaactcttagaagattgtcatccctgacttcaacctcactgcgaatcccagaccatgtcagattccgccttccccaaatagttcggagatcccccaaaatgtggcttacctgcaccctgcagaccatcctcttggcatttaccatcttccctgccaccacccaagtcctagtgcctgtccactgctgagcctgttggggagtccccgcgctgggatggagagtgctcacctgtgtggctgtcgtcgccgcagactcagtgctgcaggtgccactccatggccatgccctttcctgctttccaccctgtgagtgcactgtcttccttcttgcagcttccaatcccatcacttgtctcctgaactcattcatgtctgtaccccacccttcctttctgatgactcccaacccagggaaagcctccagagacttatttcatctcctccttccctggttgccttgcactgtcaaggaaaagccacaaaaccctgctgctgcgtccactcccaggccatgctcacttcagccgagctctcagtgatgctcggtagttctttcattcatttcttgctcactattaagctcttccagaccctgtcccctcctccagaggcacctggcctcacccttaagaataacttcctcttctatttcattgagatagatgagtcttgctttcctccctcctccctccagtccccaaatccttaccctccaattcccacatcctcttctagccttgcagacttagcgaagatgccagcatctcctttgccaaagccaacccttacccagcactttcccctcctctgggacctcgcgagctgttaactcttctgcgctgcctcctgtgcctcccctcgccggattccacctgcttctctgtgcatctacacaggagtagccttcccctttcctctcctgcgcttcttccagctcctgctcttttccattcagcttccagaaatgagtcaccctccctgccccctcctttttattgcctttaatctgacctctcccctatagctctcctgaaactgctttcagaaaggcacgtgatctcattgcaacccacctgcctgctccccaggacctgaccccagggaatgacatcccttggttagcagctctccctgctgcccgtgtggccgtggcaccctgtgcccctctaacatgcctccgttctcccagcctgctcctctccttcctccacaggtgccttcagggaagcacctcctcgtcccaccctcaaccctcttcccctctccatggaatccataggttccactctcttctccctaggaagatgatgccctgctcatacctcctgtctgatttccgtccccggccccaagctgtagcctagccccttccttcccgaagccaccacacccctgcctccttcctgcagctgagtttcatcacgttcccctcatgctcagtgacctacagctcttcctgtcgacccacagaacagaatgggattgcagagtctgggaacctgaagttggaaggactttaggattcttatcttgttgaaactctgatccaatgtaggaatgcccatcacaatatttttggacagactgtcatcaagtctttgcttacatgtctgctgttatgggaagctcactatttcatgaggtgccgtgttccattttaaaatagctactaaatgggcccgttctggtgcctcatacctgtaattccagcagcctgaaaggctgaggtgggaggatcacttgagctcaggagcttgagaccaccctgggcaacatagtgagacctcatctctatttaaaaaatttaaattattttttaaattaacatagttattaactggttattatgttcatctcccactggtcctgtaaaccaggctcccttggcgtaatgtggtctggttttcctcttctccttcacatctttcctggacttcagcctcaatagttccacactgttgcctgaaaccgtccctcccctcctgcttccacactcacacttgtgctgattctcatcagcagtgtcttggattctcaactcagccctttacttcccgccagacagtgcagatgccagagctccgctgaggacttgcccattctctccaactaaatgcccttccttctcttttgaaacctccaagaaccactttgtttatactccttatccacgtatcccttagtctatttatccattcattcactcattcattcattcagtcagcccacaacatttcttgaagccacacactggcccaggatccctgctgggcaccagagacaccacagagaacaaggcatggagcccctgccagggggagggagcttgtagacacccagagtgtaggcactcaatgctgggaaccataaaaatgggttgagttagcaaaggagaattccaggaagatccgagaggacatgcaggaggagtctaacctggcccaggtctaggagcagctccctgaagaagtgcggctaccctgagacccagatgacacgttataaggcgggtcattgttcaagggtctgaaggaagttctccatggctggtacacagaagatgaaagggaccaggcaggactcagtggctaatgcctataatcttagcacttcggaaggccgaggtgggtggatcacctgaggtcaagagttcgagaccagcctggctaacatggtgaaaccccgtctctactaaaaatacaaaaaattagccagtcgtggtggcgcgcctgtaatcccagctactcgggaggctgaggcaggagaatcgcttgaactcagggggaggagcttgcagtgagctgagatcatgccactgcactacagcctgggtgacagagcaagactctgcctccaaaaaacaaaagaagaagaagaagaagtagaagagagggaccataatgagaaaactcagagttcgaaggactttggaaagcatgctaaggagttattttaatctcgatagtaatcggaagtcactaaagggctttaccgaaaagtggcagggtcagtttatcactcttgaaacatccccctatttggttttaactttcttgtacatgggtctacacccttttttagcccctataatatttgacctaatgtggagggtagagcaggtgcagtaattaataaatgtttgtagtactgaatttgggaaataaaatatctttaatcactgtattctgaaaaatgaaagctaataactgtatgattatagactataaaaccaaaaagggcaacaataacttaaaggaacatatttgttcattaaagtattaaaaactagaaaaggaagcagtgtcgggatcttagagaatggaaatttgtcctggattaaaggtaaatgtcatccaagaatgcagatatctatttaagagggttgatattttgaagcatctaaattattaaaatcaatttttcctcattgaaaaaagtattaaactaggaagcgcttccttaaacctaaagagcatctggggcacaatcgttagcctcttgtgatgggtgtctcttgggaccagctcctgtctgaacatgaaacttgttggggtactcacgtagggcccatcctttgggcgtctgtatctcttatttcttagttttcacaaatatgcagaataatgtaagatgacagcaatgggagaaactggcattgcgggaggaatacagtggaactcgctactatctttgcaacttttctgtaaatctaaaattgaccccccaaaaagtttaacttaagagaaacagaaaggagggcagattggggacccccagtgagggcagggcagcgttaaatcacatcacaggatgtgagatcagctgggccaggatgtgcagtgaaggcagccactgagaactcagccccaagaccccaggagcagagtgcagagggtggccctgctgaggcctggaacctgctgggacagccagactggtcctgctgtcaccttaagaagcatttcagttaatgcttagttcttaaccacttagtaaatcagcatctgtttacatgtggataggatcgtgccaatggtttaaaatagttcttttctacataagcctgtactgatataaataaatgattcaatacataagtacatgggaaagaaggggcacgtctcccttacagaagaattccaaataacacatgtggacgacatcacctctaggaagtagagcttaacccttcatgattttgaggatgggctggaattagtgacttaattctgaagaaaaggaggaaagagtaacttgacaggagagaaacttgcaaatgtgaccttaaccaaatgatcctattagcatcatctgtgatgttgtgtggccatcacacacccccaatgtactctgatgagaatggggcttcgcctcagcggtatcctttccaaaatcccataaccccaggtgaatgatgacaaaagcctccaacaatgcagataggggaacattctacaaaatgcctgaccactagtcctcaagaacatcaaggtcaagaaaaacaagggaagattgagaagctgtcacatcccaaaggagaccaaggagacgtgatgagtaaatgcaaggtggtaccctggattgaatcgtggaacagaaagaggacacaaatggaaaaaccagtgaaatccaaagtctgaagttcagttaatggcaatatgccaatgttggtttcttaatcttggcaaaggtatcgtggccacgtaagatgacaacattagtgaaaatggataaagggtatgtgggaactctctgctatcattgtagcttttctgtaaatctcgggttaatccaacataaaaactttatttaaaaaaacaagataactggacatggtggttcattcttgtaatcccagctattcaggaggctgaggtggagggatggcttgagatcaggagttcaagactagcctgggaaacacagtgagaccctattttcaaaaaaaaaaaaaaaaaaaaaaaataagccaggcatgatgattcatctgtaatcccagcactttgggagacaaaggcgggcagatcacctgagctcagcctggccaacatgttgaaaccccatctctacaaaaaaaacacccacaaaaattagctgggcatggtgctgtgcacctgtagtcccagctactcaggaggctgaggcagaagaattgcttgagcctgggaggcagaggttgcagtgagccgagatcatgtcactgcactccagcctgggcgacagagagagaccttgtctcaaaaaatatataaaataggccaggcacagtgactcacgactgtaatcccagcactttgggaagccgaggtgggtggatcacctgaggtcaggagttcgagaccagcctggccaacatggtaaaaccccgtctctactaaaaatacaaaacttagccaggtgtggtggctggtgcctgtaatcccagctactcgggaggctgaggcaggagaatcacttgaacccaggaggcagaggttgcagtgagccaagattatgccactgcactccagcctgggcgacaagagcaaaactctgtctcaaaaaaaacaaaaacaaaaacaaaaacaaaaacaagatatatatatatatatatgtaataaaaaatagaaataaaaaccaagatgtacaagaaaacataaataaaatgcgatggtaagtgttttttgtttttttttttaattctgaaaatggcaactgtttgtaattaatggttgttttgttttgttttgttttttcagaggagaccattctggggtcctagggaactctctcctctaacatcctggcagtagtgtgaacaggattgtcctggttttgtgttgtttcatttttaacttcagataatgtaaattcttgatgacagtatctagtaggttataacaaacaggacgggagctcagccttgctagagcgtatatttgcagcctggcatcatcgccggagaagaatatcctggtttctaaagcagagctgagctgtttaagggactccaggtgcctctcgtgaggagaggctgataagtgggatggctggggatgtctgtagtggcactgtcccctaccatatatatgccttctgacttaagactctctacttagcatttataaaatcacagttcaagggggatcattctaattggcagaaggacttttctttgcaaaatcagtaagtgtagaatgagtgcttgtgatgcattcgaaagttcattcatgtatgcatttagcatatgtgcattggcactctaccatgtgccaggcgttgacacacagcctctacattctggttgggggagttggatttaaaagaaataaacaaggaagataatttctggttatattagtctgctagggcccccagaacaacataccacaggctaggcagcttcaacaacataaacttattttctcatagtctggaggctgaaagtccaagaccaagatgccagcagagttggcttctttcaaggtgtctttctttggctagcagatggtcaccttcttgctgtgtcctcccatggtcctccctctgtgtgtgtatccctggagtttctccctctttttagaacggtgccggtcttataagattaggccataccattacaatctcatgtacccttaattacttccttaaagactatttctggccaggtgcggtggctcacgcctgtaatcccagcactttgggaggccgaagcaggcagatcacttgaggtcaggagtttgagaccagcctggtgaaccccatctctactaaaaatacatctctactaacaatacaaaaagtagccaggcattgtggcgtacgcctgtaatcacagctactctggaggctgaggcagcagaatcacttgaacctggaaggcgggggttgcagtgagctgagatggtgccactatactccaccagcctaggcagtagagcaagactccacctcaaaaaaaaaaaacaaaaaaaaaaaaccctactaccaaatgcaagtcacattgaaggtattgaaggttagggcttcaacatatgtatgacctggggttggaggggggaaggtgcatgacacagctcagtccataaggctagtagtgataaacattataaaagaaatacaagatcaagagtgaggtcatgggactagtgtttagatagggtggtcaaatgagccctctccaaggacagcccaggcctgacccggaggatctgtgttggctggtgcatcccttacaagacaggctgagagtagaaattcacaaaaattacatggccaaagggtcgtacagttcagttagtccaaacccctcattttgcagactactgaagtcagagaagatgaacagtaacttataattgtttaatacttaaaacaacaagcttatagtagaagtatttgttttaactttttattatagactcttttaaacatacacaaaagcagtctccataagataaacaacctttactcatcttcaaaactttgctaatttttcttctatctcctttttttcctggaattttaaaacataaattccacatcttatttcactagtcaatatttcaggatatgtcactggctaatgagagttctttgttggcatggtttctttctttctttctttttttttttttacagctaatgagatactgttactattaacttcagtgaagaaactgagaccaccttcgcttagtcttcccaagacctggctaatgttagagtacatgaagaaccaagttcccaaactgcttttcccaaccctaactcaggactgtttctactccacagctaacatgataagaatcactgccaataatgtaaaaataatttccctaaatgtgctgtaattaatttaaatgactttatacacatctttttaggaacacagttaaacgtgaaataaatgagggaatgtcggtattttccgctgcctgtttgaggggaaaaaaaaagcttagtagagggtttcagagagacgggaattattctagtagaaacggaaatatctaggtgaagaatcaataagccttgtgttaatttgcctccaggatattggcattaataccaaaatctgtctctttgccaagattggagataatttgcctggattggggcgccatctagtggccatttccacatcctcggtgcgcgcgccacagagcccagcccgaccctgaacgcaagatggcctgctcagtctctatttttccaggaggtgcttttgcggtaaaaagtgattttaataggaaagcccattccagtatttcttttcataactttgaagatgcagctgcataacctagaccatttggatttgctttccttaaaactttagttatgagctccaactcccgagttttgtttttatgtgttttttacaagaagtgcccaaaaaaaaaaggaagtgcccattgttcctagtacagcagttgccaagcagctcccggtgtgcatatgcacagatggcagcgtgaccaggaggctacggcgcccagagcagctcgtgcaaaccagaccaccctaagacagcccacccaggatggcggctgtcccacccgagcgtgtgggctgggatgctgggatgtgttccattttctcaagccagtgctgacatggacctagttggatcttttcataggctcatgcctcccctgcagtggttgtggcactgccagagactgttttcacagacatgtgtcacctcagagggaagtctccggacatttctagactacaacggcagcaaatacagagtactgtgaattacagtgtgaacattcagaacactggggaataggcgatacctctggctggttaatcaatctggtgaattttattagcacagattctccatctggggtacttttcataccactaacctctgaagcacttgggaagggaggaagcacttttgtgaacttctgaaaagaaccaagtgatatttctctgaaaaatataccctcttgccttcctgaatctacgtcttcaggagtaattcagtcaataaagtgcgttttttttttttttttttttttacaaaatcctactcacaggagtatatttgagtaaaggcagtgtttcttcattagaaagagtgcaggttttagaatcttctgtgagtctgatacaaaatatggatcctccctctagaaaaatatgctcaaatatacaacattttggttcactctctcccccaaaaagcttaaaaactctatcactggaaaaaggatgtaggtaatgctgaggttcatagccttttcatcacacagaatttcttttcaattcaattttattccttaaatcactggagtgcttgccaggtgccaggcactgagttaggtgctgagtacacaaaaataaatagacataatgagagaggagaaagtaagaaactagtcaggcaggcaactagggtgggtccttggcaaaattccttcaacaaagaagagcctgacaatcaaactgcaggccccagataagaaagagcctgctggccaggtgcagtggctcatgcctgcaatcccagcactttgggaggctgaggcgggtggatcacctgaggtcaggagttcaagaccagcctgaccaacatggtggaaccccgtctttactaaaaatacaaaaattagctaggcatgatggtaggcgcccataatcccagctactcaggggggctgaggcaggagaatcacttgaacctcggaggtggaagttgcagtgagccaacattgtgccattgcactctagcctgggcaacaagagcaaaactccatctcaaaaaaaaaagaaaagaaaaagaaaaagaaaaagaaagcaagagcccacatccatccttaaatggaaatgcttactctgtgaacccagatgaacaaattccatccctttttggacacatttctctctccttggcatatcttggtctcttacttttcacctattttacatatgcctacctttctgtaattgtctggggctaagtcttcatttacatagggtgaatcatcactttagcccctgattggtcctgggccaaggtcctgggccaagacttcacctctgcctccaattggttctttacactatcatacctctttctgagtggtgctttctccaagatggactgcagaccagtcagcacactcctccccttcgagtccataaaaaccccaaactcagcctcatagctgacaaccctctcaggccccctgtccgctgcagagagctttccttttttgtttattaaaatttcgctccaacctcacccttggtgtccatgctccttaattttcttggtcatgagacaaagagctcagttaacacctcagaagaggagactgcttcattgaccctatactgcttcaatagtccatgatttcaagaaacctcataatgttctctcattttattacttttcctccatataccttgtgtcttgaaagaagttactcatgaaacttcaattgttgcttaatctctatttatttttccaagagctaaccaatgttactgccatgaagaatccaggactttgcatagaacaggtacatagcaggtgttcaataaatgtttgattattacatggagttgagttgatcaaattctaattaaaagcaaaaaaagtagttactcctttgagttttatcataaataaacttttttaatggatacgctgttttctgataggtcttttgaaaaattgaaactaatctttgaatactcggtttaacctgagaataccagttgtcaagagccatgaaccagaaactcagaatctgctctttgaaaaaagttcatattttaaggattttaattattcaataaaagttgctaagatattgtttggttaacaaaaataaaaactcacataaacctttctcttatatcataaaccagaatcaattctggaaagattaaagagttaaatattttagaatgaaagaggaaagaaagagaaaggaagagagaaagagagaaagaaagtgagccaaagactctgtctcaataaatacataaataaatccagatattccatgtatatgaataggaagtctcagtattgtcaaggtatcagttcttcccaacttgatctgtagattcaatatattcccaatccaaaaccaagtcagttattttgtggctattaacaaactgattgtaaggtttatatggagaggcaaaaatcccagaacagccaacaaaatactgaaggagaaaacaaagttggatgactgacaaacactatccaacttcaagacttagtataaagctatggtaaccaagatagtgtggtattggtgagaaaacagacaaataggtcaatggaatagaatagaaagttcagaaatagacccacataaataacagtcaactaatttttgacaaagcagcgaaggcaacgtaatgcagcaaagatagtgtcttcaacaaatggggctggaatgactagacatcaacagacagacagacacacacacacacacacacacacacacaaacagttaatctagacacagaccttacacccttcacaaaaattaactcaaagtggatcgtagacctaaatgtaaaatgcaaaactataagactcctagaagataacatagaagaaaaactagatgaccttcccccatcctcaactccaaaaagtgtggcaatgactttttagatacaatactaaagacattatttatgaaagaaaaaaattgagacactggatttcattaaaattaaaaacttctgctctatgaaagacaatgtgtagagaatgagaagacaagccacagactgacagaaatatttacaaaagacacatctgatcaaggacttatccaaaatgtacaaagaactcttaagacccaaaaataagaaaataaataacctgattttaaaatgagcaaacaacttgaacagacacctcatcaaagaagatatacagaggcaaataagcatataaaaagatgtgcaacattatgtatgtaaaccccaaatatctgagacaggtctcagttaacttagaaggtctattttgccaacgttgaggatgcatgcccgtgacacagcctcaggaggtcctgacaacttgtgcccgaggtagtcagagcacagtttgattttatacattttagggagacatgagacatcagtcaacacatgtaagatgaacactggtttggtccagaaaggcaggacaactcaaagcaaaatgggacaacttgaagcagggagagggcttccaggtcatagggaaataagacaaatggttgcattcttttgagtttctgattcgcctctccagaggaggcaatcagaaatgcatttacctcagtgaggagaggggtgactgaatagaatgggaggcaggtttgctctaagcagttcccagcttgacttttcccttgagctaagtgatttggggggcccaagatttattttccttttacatgtgtcattagaaaaatgcaaattaaaacaatagtgagtcacaactacacaactatacctgcaccactacaatggccaaaatcccaaacactgacccaccaaatgctgacaaggatgtggagcaacaggaactctcatccattgctggtgggaatgcaaaatggtacagccactttggaaaacagtttggtagtttcttaaaaaactaaacatactcttaccatatgatccagcaattatatccaccttgacttttaccaaaattacttgaaaacatatgttcacacaaaaacctgcacatgtatgtttatttgtaattgcaaatcttataagcaaccaagatgtccttcagtaggtaaatggaaaaacatggaggaaacttaaatgcatatcactaagcagcagaagccaatgtgaaaagctgtatgatcccaactatatgacattctgaaaaaaattatatgcagaattaaggagacagtaaaaagattagcagttgccaggggttacggggcagggagggatgaacaggtagagcacagaggaatttaaggacattgaaattactctgtatgatactataatggtgaatgtaagtcattatacattttcctcaatctatagaacgtacaacaccaagagtgaaccctaatgtatactatgggctttgggtaacgatgatgtgtcaattaattgttcatttattataacgaatgtattactctggtgggagatattgatagtaggggaggccgtacccatgtgggggtaggagagtatatggaaaatgtctgtaccctccacttaattttgctgtgaacctaaaactcctctaaaaactaaagagagacaaagagaatcagagagacagagtgtgtgtgtgtgtgtgtgtgtgtgtgtgtgtgtgtgtgtgtgagtgaatatcttctttctgaatgaggaagaactttctaagcataaaagcaagtaagaagaaatcacaatttcattttgtcaaatggtgaaaaaaaacttcaccatttgacttttcaaaaatctaaaaggcaagttgcaaactgggaaatagatttacaacaattacgacaaaggtagaatgactgtaatcaaaggatcaaagccttccatgcctagaacagataatcaggcaaaggagatgcacaagggtggagacaccgaggtttaacagcccagcatggtctcccacctcccacggtgccccctgtagacagagattagaatgttggaaactatattttcccgactcccttgccagaaggtgctcatctaagcaatatatataaatccaaaataaacaaaaaaaagcaagttacttaaatgttcattattaatggatgaattaaatgaattctagtgcatctatagatattctatatggtcacttcaaataacgtttaagaaaggattttgataacctgaaattggcgaagccctcaggaaaattacctccacatagagtatgatcttcccccaacctcaactccaaaacagaagcatcttttcttctcatgagaatcaaacaaaattgatataagactttgaatattgtcttttttgttcaccatatctctatttattgtctcacattctttatttaaaggagcataattattttcaagaaaccaactcactttgttaacagtgatgcagaaatacatttatgatgatgtgatgtgaaatgggaaataataagaaagccaggtccatgctctccggggcttttggactaagatcttgaaacccaaattcttaggggagaaggaaacaaggtaaggcaatcagtaacctaagttattgccctcgttcttaaaccagaaagccaagatggccttgggccctttctagatggatatatagatagatagataggtagatagatagatagatagatagatagatagatagatagatagatagatggaaggaaggaaggaaggaaagaagggagggagggagggagggaagaaagaaagaaaaagaaagaaagaaagagaaagaaagaaagaaagagaaaaggaaggaaggaaagaaggaagggagggagggaaggaagggtgatagaacaaatcaaacattactgggtatatacatatagttatatatgagagattagaagaaaagtttttatcagcatttcaaataagattaaaggagatcataattaggttaataaataggtctttaatttttgccataagtgaaattaaaaaatatttcaagatctctcctgatctcagaacagtcacctgtcatacatataaaggtcaagatttgggataaaacccttcacccgctttccaaatcacaaaatcaatgtttcctacctgttctagggctcagaaactatttgaatgagggtagacattcacaaacaagcaaccagaagaaatgtagctcgtatctggcatggtatacaacaggagtaaaaggcacatctccagtgtttattaacttctgttttattgccatcaaaaggatttcttaaatcgtcttgtccagaaaagaagatcctaatttagatctccaaacacctagtaagagtctgattttttttcagattttttgctgttggcacacagaaatgctactgatttttatttgttggtgttgtatcctttactgcatttgtttatcagttccaatagtgttttggtggagtctttaggtttttccaactataaggttatatcatctgcaaacaaggataatttgacttcttcctttccaatatggatactctttatttctcctcttgtctgattgctctagctagacttctgataactgactctttaaagcaaaaataatagcatagtattgtgtggagtttataatatatgtagatgtaaaatactcaacaacaatagcaaaaaggataggtataacagattgtactttcttcaaaagttggagtctaattatgatgaaacccttgtgatttgccctttatgatttcctcaatgagtagaatgtggcaaaagacttgctgcaaaccaatcaatgccagatcataaagtgcagtagaaattacacctggttctctctctctctctctctcctcaggatgcttattcttaagcccttgaaaccatgctgtagagaaacccaggcaacttggagagcacacatgtaaagattccagctaacagcctcagttaatattttagccaaagccagtatttactgcaagacatttgaatgaacaatcttttggatgtttccagctcctgctttgaagtctttcagctgagtccctaataccaaaagcaagaacaagctgtctctaccgtgttctgtccaagttcctgacccacagaatttatgagcgtaataaatggttgcttaggctactaaatgttgggctaacttgttatgcaaccatacagactggaacagagagtggggttttttgtgacaacaaaagcaacaacaacaaaaagcttaaaacatgtgggaatgactctggaaccaggaagtgcgtagacaagttggaataaccttttaaagagtgttaatcccactactttgggaggccaagttgggaggatcgcttgaggccaagagtttgagaccagcccaggcaaaacagtgagacaccatgtctatgaaaaattaaaacaaaaaaattagctgggtgtggtggtgcatgcttgtagtcctaggtacttgggagattaaggtcggaagattgcttgagcccaggaattggaggctgcagtgagctatggacatgccactgccttctagactgggcaacacagcaagaccctgtctcaaaaaaaaaagtgttaataatgaaagtgtgaaaggctttaaaacagctgttagcacaagccaagttacttgaggaattgtcagtatgggcttaaggaaaagtgaaggaaatattattggaaattgaagaaaagaagctttgttacatattggtagaatattttgcaaaatgttatctctgataatgtgtagaattataaattgtacctaataatctggctgatttatctaaggagaattccaagtaagagttttgaagtcactgcctggattctctagctccagatagtaaagtggaaaagaagaaacatgagccaaaaaataaattattccattttaaagtttatagaaaatatcaagtagccagaaattcttgggttaaaaatatctgtttcttattcccaatctttccaaaactctcaaatctaaaaagaccctcagagcaaagatcaaatccactgtgggattatatggtcatctgtttagacctcagaaatattttaacaggcacctccaagaactgttcagtcagaccaaaagctctttgaggattttagcatgtcacagagagcctcttctctgacaacagaggttctaagaattgcaagggttttgaccctcaacagctttccaaaaatctcatgatagagaagggcttatcttggcccagcacagtggctcacaactataatcccagcaccatgcggggccatggtaagaagatcacttgaagccaggagtttgagactagcctgggcaatacagcaacatccctgtatacaaaagagagaggtggagtcttatcttgaggaaagttgggattatcactttcatataacaatgtgatccctaaaaaattcatagcaagcccacagagttttaaagagaattatagtagctctaagtagactgcaataagtaatgatgcatgatttaatccctagagtaaatactaaaaaaatacaaagaaatataacaaaacctattcaagtaagtaaaatggaatgctaaacaaaattttatttacctaaagcagacagaaagggaagaatagaagaagcaataatagattgaaaaaataaaaaagaaatagcaatgtggtaaacttcaatccaaccatatcaataattctattaactgtaaataaccaacataattaaaaggcagagattgccagacaaaatttttttaaatcaaaactcaactataaactctttacaagagacaagcttttaaatatgaatgcttagatcctgcaataaactgtctttactccgtgtgtgtgtgtgtgtgtgtgtgtgtgtgtgtgtgtgtgtgtgttttgagacatggtctcactgtctcacccaggctggagtgcagtggcatggtcacatacgtctcactgcaacctcgacctcctgggctcaatcaatcctcccacctctgccttctgagtagctgggactacaggtgcacaccaccatgcctggctaatttttgtattttgttgtagaggtggggtttctccatgttgcccaggctggtctcaaaatcctgggctcaacttatccgcccatctcagcctctcaaagtactgggattacaggtgtgagccaccacattcagccttgactccattcttgatgtttggctgccgacagcttacaagccccacccttgccccttttgtcccacatacaggcaaaccagtaagaaagcccacaggctctcctctgtccccttgatactgaaagttcaaaccacacaagtctcctacactggcccacccccagccacaacataaaccaaattcacttgtcccagtcaccctcttggctgaagccattcttgactcccttgtacctaccctgctctcctgaaaaagtcccattatgtgagtaataaattttttcataccctcttgataagaatggcatcatcagtcttgacatccaaacctattttgagcagcgaagttaatcctgccctccatgaggccaccacacagcaaattaaaagtaaaaagatagagaaaaaggaacatgtacccagaaagcaaaagatgatgaggctatattgttacaagacaaagtaggctttaagataaggaatattgtcagggatagggaggtgatttggtaatgatgaaagattctattcatcaagactacaaacaatcctaaatatgtatgcatctatatcggatcttaaatattaaaataagatacatcttacagaaccaaaggaagaaacagacaaatccataatcatagttggagattttaataccaatctcctagtaatagaagcaacagacaaaagtttagtaaggatttagatttgaacagcactatcaaccaatttgacttaattgacttttatagaagcgtataccttataaccacttaacgtatatgtgtatttgtcaagtgcatatggaatgttcagatagaacacttactgggccataaaataagtgtcaacagtttcaaaagattgaaatacagaacatgttctatgaccacaatgaaattaaaattaagaataaataacaatgagatatctagaaaactcctaagtattggaaattaaacagcatattctcaatgaccaaataagataatgaaataagttttaaaattttttaactaaatgataatgaaaacacaacatataaaaacttgtgagatatagctaaagcactgattcccgggaaatttgaagacttatattagaaaacaagaaaagtttaaaattaatgagctatgtttccatcctcagaagctagaagagcaaattaaatgcaaaacaagtgatatggtttggctgtgttcccacccaaatctcatcttgaattgtagctcacataatccccacgtgtggtagggacctggtgggaggtaattgaatcatcagggtgggtctttcctgtgctgttcttaaagtgaataagtctcatgagatttaatggatttttaaagttcagttcccctgcacacgctcatttgcctgccaccatgtaagacatgactttgctcctcctttgtcttccaccatgattgtgaggcctccctaaacatctggaactgtgagtccattaaacctctttttctttataaattaatcggtcttgggtatgtctttattagcagcatgagaacagatgaatacaacaagtataaatagggaaataataaagagcagaaattaatgaaatgaaaagtaggaaaaaaaggaagccaaaatttggttatttgaaatatcaataagattaataaatctctatcgagattgagtaagaaaattagaaaaaagacacaagttactaccagcaatgaaaaaagagaggacactataagatttcagagataataaagtgataagaaaatgttattaatggctaaatgacaacaaatttgacaacttataggaagtggacaaattccttgaaaaatatgactcaccaaaacagacacaagaagatatagaaagaatggcttgatatcactgaaattgaatttgtgatgaaaattctttctacaaagaaaactctaggcccagataatttggtaaacttaagcaattaatgctagtcttaacagctttttcagccagagggaacacttcaccgcacatttggtgaggccagcatagcactgatactaaaacctaaaaaaaagtcattgaaagcaaagaaaatcataggctaatatccaacatacattccacgaaaataaaattacagaccaggattttttagacattagcaagtagaagacagaaatataagaaaaggataatacctcatgaccaagtggggtttatcccaggaatataaagaagtttaacattcaaaaattaatatactccttcacataaggataaaggagatatcatacaaacatgaaacaaaagaaacttggaatggctacactaaaatgagacatggtagatttcagaacaaggactattactagagggaaaaaaattcatattaataaagagaactacttatcattcagttgtaaaaaaatcttaaatgtgtttgcaccaaagagatatttcaaaataaacgaagcaaaaaacaaaacaacaacaacataaaaaccctcaaaagattgaaagaagaaatccacaattagagaaaaagagttgattattttttcttcagtcattactagagcaacttcatggaaaaattattgaagagataaaagacttgaaaaacactatgtagcaatttaatcaatttacatttatacaacatttcacccaaccacaaaagaatatacgtttttgtttaagtgcacctgaaacattcacaaagatagaacatatgctgggctataatacaagtttcaacaaattttaaagattaaaaccatactgaatatattctctaaccacaacagaaaagaaaatgaaaatcagtaacaggaagatatcttttaaatctcaaatgcatagttaataaactaaatgaaaatgaaatcacaaggcacaaaacttgtgggatgcatctaaagcagtgctccaagggagttttgaaactttaaatgctattttggaagacaaaaaaaagggtatatgatcaacggtctaagcttccatcttaagaagctagaaaaaagaagaacaaattcaacccaaagtaagtataaggaatagaatataaaaaagcagaaatcaatgaaatagaaacagaagaatagtacagaaaaaaatcaataacagcaaaactgattctcttttataagcttaataaagttgataaatcacgtacaaaaattaaaaatatagaaaggataataacttaataaattcgacaacttagataaatggaacaaatttcttaaaagataaaaattaccaaaacagtttcaaatggaaatagagtatctgtatagccctatatataaaagaaattgaattcaaaattttaaaattacaaagaaaactccaggcctgcatggcttcctaggtgaattatgttaaacatttacagaagaaataatgccaatctttcataggcttttctgggaaatagaagagaagcagatatatcctaatcattcaatgaggatagtatcacccatataccaaaatctgacaaagatttcataacaacaggaaactacaacctatccctcattaacttagatgcaaaatcatcaacaaaatatgcaaaaaaatccaaaaaacaaggccagcaatatattacaagaataatatgttatgagtaaatgacatttatttcaggaatgcaaagttggtttaatgatttaaaagagtcaagttgcaaggagtctcaaatagccgaaacaatcctaaaaaagaagataaagttggaaagctcacactttctgttcaaaaattattacaaagctacaataattaaaactatataacagtggcacaaggacagacatagggaccaacagaataaaacagcccagaaataaaccctcacatatatgtttattgatgttcaacaagggtgtccaaacatttaatggggtaagacagtcttttgaacaaagggtgttgggaaaactagatatccgtatgcaaaagaatgaaattggattcttactagacaccatatataaaaaatgatccagaatgaatcacagacctaaaattaagagttaaaactgtaagactcttagaagaaaacacagagtaaatcatcatgaccttgaatttggcagtggattcttagatatgacaccaaaagcacaggcaataaaagaaaaaatagataaactgtacttcaattaagttaagaagtttagtgcatcaaaagatactatcaagaaagcaaaaaagacaatctactgaatgggggaaaatgttttatcagataaagtattaatttccaaattatataaacaactcaacaaaaaccacaaaaataacccaattcaaaaatgggcaaaggattcatatagacgtttctccaaagaagatgtgcaaatgaccaataaacacatgaactgatactcaacatcattggtcgttagagaaatgcaaatcaaaacctcaatgagataacatttcacacctactagagtggctgtaatttttaaattttaagaaaaaaaacagaaaataataagtgttggcgaagatgtagataacattggaaaccttgtatttctggtaggaaagaaaaatggtgcagccactgtgggaaacagctgggcggtttctcaaaaggttaaacatggaatcatcatatgactcagcaattctactcctaggtatatatccaaagaattgaaagcagagacctgaacagatttatagatatagatatacagatagatagaggtgagatagagatagagatagagatagagatagagatagagatagagatagagatagagatagagatgatataggattctttttttgagacgaagtcttgttctgttgcccaggctggagtgcagtggtgcaatctcagctcactgcaacctccatctccctgcttcaagtgattctcccacatcggcttccccagtagctgggattacaggtgcccgcaatcatgttcagctactttttgtatttttagtagagatggggtttcactgtgtaggccaggctggtctcgaactcctaacctcaagtgatcctcctgccttagcctcccaaagtgctgggattacaggcatgagccactgcatctggcctgaacagatatttacacagcaatgttcacagcagcattaatcacaatagacaaaatgtggaaacagtgttaagtatccatcaacagatgaatggataaacaaaatacagtattaattacagtatgtttgtatagtggcatatatttaactataaaaagacaaaacttttatatatgctataacatggatggattggacctcgaaaacgttatgcttactgaattaagccaaatataaaaagacaaatactgtattactccacttagaataggtatctagaatggcaaattcatagctatagataaaaatgtgaggtatagatagtagtgatggttacacaacattgtgaatatacttaatgccactaaattgtacacttcaaaaaacatgaaatacttgaagataagtatgcacaaaatatggataaaacctacacaatgaaaaccttaaaacactgctgagataaattaaggacctaataattggagggttatgccatatcataaattttaaaactaaatattgctatgatgtaaattatccccaagatgatctacatgatataatgcaaatccaataaaaatgtcagcagacttttttgtaaaaattgataagttaattccaaagtttatgtggaaatggaaaagactagaatagccaaaactattttgaaaaacaagaacaaaatttgaaggtttacaataactgactttaaatcttgccataagcttcagtaatcaagacaatgtgttatgagcataaggatagacacagaggctgggcgcggtggctcacgcctataatcccagcactttgggaggccaaggagggtggatcacttgaggtcaggagttcgagaccaacctggccaacatggcaaaaccctgtctctattaaaaatacaaaaattagccaggcatggtggcacatgcctgttgtcccagctactcagatagccgaggcacaagaatcgcttgaacccaggaggcagaggttgcagtgagctgagatcgcaccactgcactccagcctgagcaacagagcaagaccctgactcaaaacaaaacaaaacaaacaaacaaacaaacaaaaaagaataaagaccagtggacagaacaagagaacagaaatagacctacacacgtatagtcaattgattttctacagacgtctcaagataattcaatgcaggagaaatagtctttgcaacaaattgtgctggaacatctaaacagctgtacgagaaaaataaaataatcttgacccatactttacatcatgcacaaaacctgagctggaacatagcgctacacataaaaactaaaactataaatcttttagaagaaaacgtgatctggtagttggcaaagattttacacaggacacaagaaatccatacagcaagtcctcagataatgttgtttcattcaacatcactttgttataacattgatgagaaaaaaaaaaaaaaactgattcccggccaaggccactgcctatgtgaagtttgcacattcttcccctgtctgtgtggattttctctggaaacgccggttttctcccacatcccagagaagtgcactcgggttcactgctgtgcctagattgtcccagtctgagtgagtgagagtgagcgtaggagggtgggtgggagtgtgtgagtgcaccctgcaatggaatgctatcctgtctgtccaccctgagctgcctggataggctccagccacctacgaccctgagctagaataagtgggttggaaaataaataaaggaatgaatacaaattattgtaaaacaaaaattcaggccgcacacagtggttcacgcctgtaatcccagcactttgggagaccgatgcaggcggatcacttgaggtcaggagtttgaccagcctgaccaacatggggaaaccccttctctactaaaaatacaaaaattagccaggcacggtggcacgtgcctgtaatcccagctactagggaggctgaggcagaggtttcagtgaaccgagattgcaccactgcactccagcctgggcaacagaacaagactccatctcaaaaaaaaaaaaaaaaattcatgaagtctgtgatcgttatacaaatgcatgacaaacaattgtagaaaatcaattgactctacgtgtataggtctatttctgttctcttattctgtccattggtctttatgtctattctggtttttttgtttgttttgttttgttttgagtcagggtctcgctctgctgcccaggctggaagtggtgcaatctcagctcactgcaacctctgcctcctggtttcaaggtctgaaagcactcagcaaaccctcgagatttgctctggtttgtttctgcactgtgtggcagtaggaggtgctccttccaatgttcactctggaaacatttatttctaaatttaaccctccacctaagacagctatcactcactgattcacgagaaattgggtaaataatgatcttccttgtttttattaatctttcttaaatgtatatatagctcacatttatttcaatgtttaatactagaagtgtttggtgtctttatttagaagtttagtgatgttttcctggctggatatatgctgtgagagcttaactcttgtttatatcaattagcctatggtaaaactgatttcattttatatcactttgcttaaagtagaagaacctaccaacaacagtaagaactcacatactttgaaagaaaaaaactgattgaatcagattttttcaaattgaatgtcttattctttgaaggaaactattaagaaagggtaaagacaagccacaaactgggagatatttatatttttttttaaattttatttccagaatatactcaaacagctcaataaaaaactcattttttaaaggacaaaagattttaacaggcacttaacaaaagacaaagtataaaagatcaatatgcacatgaaagatgctcaacattattaaatcacagggagctcgcgttacataaaattagaatgattaaaacctaaaagtctgacaactgccaagtgttggcaaggaggtgatacaactggatttgctatgtatcagtggtggaaatgtaaaagggtcaactactgtggaaaacagcttggtagtttctttttttgttgttttggggtttttttgtttgtttgctttgttttgtttcttttttgttttgtgtgtttgtttttggtttgtttgttttgagacacagcttcactcttgtggcccaagctggagtgcaatggcaccatctcggctcactgcaacctctgcctcctgggttcaaacgattctcatgcctcagcctcccgagtagctgggattacagatgcccaccaccacacccgactaatttttgtatttttagtagagatggggttttgccatgttgaccaggctggtctcgaacgcctgacctcagatgatccacccatctccacctcccaaaatgctaggattacaggcgtgagccaccatgcccagcctggtagtttcttataaaggtaagtgcacaatttacacacaagccagcaattctactcttaagtattttcccaagagaaatgaaaacatatatgcacacacagagttgtacataaatgttcacagtggattcgtttataacaggcaaaaaaaaaaaaaagggaaacgatccaaatttgcatcaactggtgaatgaataaaaaaagtaatatatctctacaatgtagtactatttaccaatgaaaaggaatgaatgatacacacaacaatatttatgagttaaagaagccagacacaagacaatacatgctatatgatgctattaataagaaactctagaaaaggcaaatctacaatgtagtgatagaaatcagatcagccttttcctggaaccaggactgggggatcgactggaaagagcataaggggactttttgaggtgatgacaccactcatcacttggataaacacacaaataatggactcaaggataatcctcaagagaaggaaaatgtcattccagaaggaggtacaagagtaaaagggaagcaggccaggcgaggtggctcacacctgtaatcccagcactttgagaggccaaggtgggaggattgcttgaggaggggttcaagacaagcctgggcaacatagcaagaccctgtctctactaaaaataaaaatttaaaaaaattagctgggtgtggggtgtggggctgtagttccagctactcagaagttttaggtgggaggattgcttgagtccaggggtttgaggctgcagtgaactatgatcataccactgcactccagcctcaggggacagagtgagaccctgtgatatagtttggctgtgtccccaccaaatctcatcttgaattgtagctccctcaattcccacatcttgtgggaggggagggacccagtgggagataattgaatcatgggggctgtttcccccatattattctcatggtggtgaatcagtctcatgagatctgatggttttttgagatggagtctcactctgtcaccaggctggagtgcagtggtgcgatctcagctcactgcaacctctacctcctggttcaagcaattctcctgcctcagcttcccaagtagctgggactacaggtgcgcgccaccacactcagctaatttttgtattttagtagagatggggtttcatcatgttggccaggatggtctcgatctcttgagcttgtgatctgcccacctcaccctcccaaactgctgggattacaggcatgagccactgtgccctgccggtctgatggttttaaaggggaaaccctttcactaggctctcattctctcttgtctggtgccatgtaagacgtgcctttcaccatgattgtgaggcctccccagccacgtggaactgtgagtccattaaacctctttttctttataaattacccagtcttaggtatgtctttatcagcagcatgaaaacggactaatacaccctgtctcaaaaacaaagaaacaaatgaacaaaaagagaagtgggaatatccatgagaagaaaatgttccctgtgagtgttcattgtcctggaggggtgagtaatgaggggaatcacagcatcctaaaagaggaatctgactagagagttatcccagcaattttaactgaaaaagaggagaggaaacagaggagaagtgaaagagaaaagtgagagggaaaaggaaagaaaagaggaggagatgatggagaagaagaaaagaaggaggaagaggaaaaggaagagagaagtgatgggagaagagaaagaaatggagaatacacatcaaaagagaccaaggtgctctcttacacactaaaaatctccctctcctgaagccacagttggtttgggcacgattcagtgtggtgctttgaaatattgtgtatcccatttttttttgaattaaaaaagaagaaaaaaagagaaatattgtgaagccttgattggttgatactcttttcttttcaaatctctgaagcatggattaatactacttacaagaggtctacccagccattgaatgcaatgaatctctagggtttttggtaggagttccagtccagcaaagtgtgacagtagatgctgtgacccaccagagtcccggaacatgatgtttgcttggcccacttgtttgggctttggacttaattctcatttcctgtgactttcaccccactcaccctcaaggtctgtgtcctgtgctgaatgtcaccagcttggccacgttccgaatgcctttgtcagcccccatcattcccctgggtgccaaagctcactgcctatttcctgccatcaccagccttggatgggatacagtcataaatgtatgtgtattccagaatcatggcacagttctagccaatggcatggtgttgcctgctgtctggaacctccagctgctgctgtacaccaccctctggattagacatctgagtttttggttcttagcagaatcaagccagagcatgccaagcatctgaaacccggcgtcttaacctccgcgtctatgtttggtggaatggcctctacaactgggcaggtgctcctgctgacctataagctatacctgaggaaatggggcaccttctactctagctcgccctcacctctgtggtcttgccatactgttccagttttgttctagatctccctcaaattatgataacaaggttacatcgaaatcaaatggttttagccagttgcagtggcccacatctataatcccagcactttgggaggctgaggtgggtgaatcacccaaagccaggagtttgagaccagcctggccaacatgacaaaaccctgtctctactaaaaatacaaaagttagccaagcacggtggtaggcacctgtaatcccagctactgaggaggctgaagcatgagaattgcttgaacccgggaggtggaggttgcagtgagccgagattgtgccactgcactccagcctgggtgacagagtaagactccatctcaaaaaataaataaataaaaataaattttaaaaataaatgacttttaaaaagcaatctgaaaagtccagtttatttctaatttagtagtcatttctgaggattaaaaaaatcttcagaaaaataaacaaatgcaactgatagtgctgtatttttttctgatgggtgacacttaatttcaattttgccaagtgcattggcaagagagcaccagctggcagaaaatgagttgcctaccatggaggtgcagaaaaataaaatgcagagaggatggaatgacatccattactgttattagagatgtttgagatttcacaagaacaaattactctcataaaaaaaaaaaaaacaggaaacaaggtgaagatacaaaatcatttgggaaaaatgatgttggtacctttttggaacaaatatatgaatacattttcaggcggacaccaatgcacttgttaggacagtatataattgaactttataccacctattttaaaggcaaatgtgctaattataagttaaaacctcataatagttcttctataattgttcacagggatgaatcatagtggttctcaactagtgcacttaaggccacatttttaaataagggagtttgttttaaaatccaaattccttgtttctaatgcaggaatttgaattcaatcatctggattagggccccaaaatatacacttttaacaagcacagtaagtgattctattgagtgtggtttctttacaggctgagagagatgctttaagtctctgcaaggtgccacagttccttctgaatcattaaggaagaatggaattgtttatcttcagatgacttttaaagtttgcaaagctagtaatccctatatgagtcacatataagagctcttagcaatcagtgtactttataagaaaacaattcaatccccaagcatgtagggtgattctgctgccctaccacaggcacctgttactaggaacaggtgtagggagacttgctattgcctaatgtctacctgccgactatccagagcaagtttcagaacatgtgggttctggtttctcctctcacacggaaaccactaacctcatctgctggttcagttctgtgtcctccccaaccagactccagacaccctcaaaggagtaccctagctctagccgtcagaggaatgagccctcctgatatctttaaatgtcttcctaaggctttcaggagcaaacttgattctctccaaagcaaactggtaactcagaaagcaccaactcttgccttttagctcaattccatcacgccttcttcagataggtatctatagctagactccagcccctccttctcagccatttacagcagtgattctcaaccttggcttccattagagtcattatagaagaagacctacctggcttgctgccaccaaagactgtgcttccacaaattctccaacaaatctccgtctaccaacaacaataacaacaaaaagaatcattacagaagcttttaaaaatatcaatgcctaactctcaacacaaacaaaaattaactcaaaatatcaaagacctaaatgtaagagtgaaaattacaaaactcttagaagaaaacaagggtgtatgttgaacttagcaatggattcttagatatgagaccaaaagcacagtcaacaaaattaaaaatacataaatcagacttcatcaaaattaagaacttttgtgtatcaaagaatactagcaagaaagcaaaaagacaacctacagaatgggagaaaatatttgcaacttatacatctgagtgtataaaggtctagtatccagaatatataactcttacaactcattaaaaatgacaagcaactcaatttaaaaatgggcaaaggacttgaatagacagttccccaaagatacagaaatagccaagaagcagatgaaaagatgttcaacattagtcattaagaaaatgcaaatcgccatgcacagtggctcacatatgtaatcccagtactttgggaggccaaggtgggtggatcacctgaggtcaggagttcgagaccagcctggccaacatggtgaaaccccatctctactaaaaacacaaaaattagccgggcatggtggctcacacccatagtcccagctacaggcatgagaatcacttgaacctgggaggcagaggttgcagtgagccaagatcctgccactgcactccagcctgggcgacagagaaagacactgtttcaaaaaaaaaaaatatatatatatatatatgtatatatatatatatatatatatatatgcaaattaaaatcacaatgaaataccaacttacatccactagaatgccatatttaaaaaaaaaaaaaaggaaaatcacaactgttggcaaggaggtggagaaacaggaacattgctggtaggattgtaaaatggtgcagccactgtagaaaatagcttggcagtgccacaaaaagttaaagatagagttaccatatgacccagcaactctactcctatgtatacaaccaaagtaattgaaaccaggcattaaaacaaaaatttgtacatgaggctgggcacagtcgctcacatctgtaattctagcaccatggcaagcggaagcagacagatcacctgaggtcaggagttcaagaccagcctggccaacatgatgaaaccccgtctatactacaaaatacaaaaactaggctgggagcagtggctcacacctgtaatcccagcactttgggagggcggggcgggcaaatcacttgaggtcaggagtttgagaccagcctggccaacatggtgaaaccctgtctctactaaaaatacaaaaaaataagccagacgtggtggtgggtacctgtaatcccagctactcaggaggctgaggcaggagaattgcttgaatctgggaggcgaaggttgcagtgagccaaaatcgcaccactgcactccagcctgggcaacagagcgagactctgtctcaataaaataaaataaaaataccaatacaaaaattagccaggccaagtggcacacacctgtaatcccagctacttgggaggttgaggtcaagggatcacctaagcccaggaaggtcgcggctgcagtgagccaagatcacgccactgcactccaacctgggtcacagagtgagactctgcctcaggaaaaaaaaaaaaaaaaaaaaaagtacatgaatgttcatagcagcattctgcatagtagccaaaaagtggatacaatccaaatgtccatcagcaaatgaagggataagcaaaatgtggcatatccatacagtggagtattattcagccatggaaaggaatgaagtgctgatagatgctacaacatggataaaccttgaaaacgtgctatgagagacagcagacaaaaagtcacattttgtgtattattccatttatatgaaatatccagaagaggtgaattcatagaaacagaaagcagaattgttgttgctagaagctgtgggtggagatggagagtggcttcttaaggggtacagactacccatcccataacgatggaactagagagaggtgatggttgctcaacactgtgaatgtattaaatgccactgaatcgttcactttaaaatggttcattttgttatgtgaattttacaattaaaaaaaaaaaatcccaggcctgacatggcagctcacgcctggaatcccaggactttgggaggctgaggaggaaggattgcttgagcccaggagtttaagaccagcctgagcaacatagagagaccctgtccctacaaaaaatgcaaaaattagcctggtatgttggtgtatgcctgtagtcttagctactcagaaggctgagatgggaggatcgcttgagtcggcgaggcggaggttgcatgagcagtgattgtgctactacactccagtgtgggtgacagagtgagaccctgtctcaaaaaaaaaaaaaaatcccagtgtggaaccccagacccattaaatctgaatttctggagtggagcccaggcatgagtacatcttaaagctgtctgggtggtttcaatatgcaggctaggttatgagccacagatacagtcgctggctagtatacatcctgcccttccgagagtccagtgggatttgaaattggtagcatttgtctggtgcatagaagtgtccaggcaacattcttttcgtgtgtatacaacaggcgttttgtctggcttcctggcttctccaggccttgccaatcctccctcaaggagttgatgtcattgcagaaatttgcctaatctcccccgtcagctgcagcctgctttgtcctatcacatcacctcttccaccagtcctgaagccagcacacagttgagtgactatggtcctgataggcttctctgcattctgctctgaaggaattcttctagtgaccaggctctgcagtcacttctcacatggtctctgccatttggcatttatgtggctgcacagaatctaagccttttcctttcaggaactccacacttgtgaatcctgaaaatgtcaggactgaaatgctggtagctgaaaatgccaggtactcccttgctgctagggtaagggtgcgtcatttgacttggccagtaataggagaccaccccagactttgaaaagagctagtgatgcagaggtgcaagaagagctggaggcctccctgggggaagttgctggggtctcattggttggtgttcagtgccagcaagatcaatgatccaagctctgtgatcctgtgctcagcaagatggcatcaatgtccaccagttcagtgcgtgattgtgggctgagatctgaccacgtggcctctggtattttaatatgttcatttgattctgaaattagtcagtgatatggtttgtttctgtgttcccacccaaatcttatgtggaattgtaatccccagtgttggaggaggggcctggtgggagatgactgaatcatggggccagacgtcccccttgctgttctcatgatagagaggtctcacgagatctggttgtttaaaagtgtgtagcagccaggcacagtggctcacacctgtaatcctagcactttcagaggctgaggtgggtggatcacctgaggtcaggagttcgagaccagcctggccaacatggcaaaaccccgtctgtactaaaaatacaaaaattagccaggtgtggtggcacacacctgtaatcccagctactcaaaaggctgatacaggagaatcacttgaacctaggaggtggaggttgcagtgagccaagattgtaccactgcgctccagcgtgggtgacagagcaagactccatctcaaatgaatgaatgaatgaatgaataaattaataaataaaaatgtttagcacctccgccttctcgctcttcctcctgctctggcatgtaggatgtgcctgcttccccgttgccttccccatgattgtaagtttcctgaggcctccccagccatgcttcctgtacagcctatggaactgtgagttgattaaacctcttttcttcttaaattacccaatctcaggtagttccctctagcaatgtgggaacggactaatacagtaagtgctgtttgtatttagacctttctctgttcgtctccctgacgtccccccactttcccacctaacttcggcctagactctttgggcttggccttggtggtacagggcacagagaaatgccctcatgctctcttgtgtctcagtttctgccagctctgagtctcatcaggtgtggcttcccccttgctctcagcaggccacctgttcctcactaggggacacgtggggaacaagaatactagcctgaatgccagagccttggagatcttcgtgaaaacagtgctgctggtcaaacatcctaatccactcagccctctgctcacttctgtaacccttcattcattcagtagacgttgttgaggccctactgcatgtcacagactgttctaagcccttgggtgaaacagtgaacaagacgaggtccctgctcatgtaccagttagattttaggcaggaaagacaaatagccaaattaattctgaatgttgatgacagcactgaagacgaagaggagaaacggtggcacatatgagtgggcagagggggcaagcagcaccctgcctacatacaatgggcaggggcgccatgtgagctgaggcctgcagcatgaagaagctaggcaagtggagacctgggagaagagcatttcagacgacagctaactgaagggggccacacggtctttattttttatttttattttttgattcagggtctcgctctgtcactgaagggctaggcttcagtgcagtagtgcgatctcagctcactgcagccttggactcctgggctcaagcaatcctcccacctcagccccctgagtagctgagaccacaggcacacactgtcacacccagctaattgtttttttcttgtagacgcagggtctcactatgctgcccaggccagtctcaaactcctggactgaagcaatcctcctgtctggcctcccaaaatgtcaggattacagccataagcccccatgcctggactgccacacatgctttgtctcttcccatggagaggtaggcctatggtcagcctcttgaatctagctgggctcaactgccttgaccaatagaatatggcaggattgactctgggacagtttctaggccataagagaccagcagcttcaacttcctgtctctggggaccctacatctgggaaccctgagccaccagatgagaagtctgactctcctgctggagagaacacacacagagtacccaagactgcctggagagggaaaggggtccaaccttccagaaccttccggacatccctatcgagagactgggatgtgagtggaactgtcttagaacctccagaccagacccccaccccctgctcagtaccagtcacgactcacgtccgtgccacatggaatagaagtattgcccagctgatccttgcccaaattcctgatcctcaaaatcatcatgataaataataaaatagttgtcattttaagccactatattgtggggtgatctgttctgcatcaacagaacactgtgacacagtccaggggaaccactgtgcaaaagtcccaaagcagaaatgagtctcagattattcaagggatcaaagtaagaccagtgtggctgaggctaataaaaggatggagaggagtaggaggtgaactgggcaggctgagcgggatggaggtccgcagcctggtagccatgcagtgggcagccattggagggattttaggaaatgcatgctgtcgtctgcgggggtgcaaaagtgaacaggagcaaccaatgaggttgttgcaactggcgaattttccgggttgggaatttggcccagtgttgggaaacttaccttacaacactcattgacttcctgacctttgttgcagctcaagcagctggtcctctgccttgtctctgtaacttatcctttgctttgcatctcagttctgccaatggtgcctctgtctgactcagtttcccagccttcttctttggggccagcctgtctgcagacagcacaagccctgcttccctttcttccctgtgatgaaatagacctggtgcccatgcaggaggcccagcgtggcccactgttgctgtgaatggggataggtcctcctgattttggggttcagtattaggaagctccctcacctccagacaccagccaaatccttcaataggagcattatcaataagaaagatgatgttttgcctctgctgcctgattcctgtctgtcaattgaattcaaacttaggtggagaaggcactgtttattaggacccggaatccctaacacctgagatcctgcagtaataatcagcctggtagccacagtgttcctggaattgcttaactcacgggttattacctgccccatgcctctctgatggtgaccacctggtcaccaacagtatcccaactggattgtcacatctttcctgtgtctagactgttcctttgtcatgtgacatccacttgtcctgatgcctgccctgtcacctctggttggatttcctaacagtgttgctggcttcacagcccagcagacatcacttaagtctaaaagtgggtactagacttcctttgattaacaccgactgggccagctcctttagctctgtctccaggtggactgcagtggttgtgtcattcacatgcctgagcccctcccattggccaaacccacagcctgttgacctatgagctcccaaccccacaacacaggcaggagacagcagcacagagttctcaagttctaccaggtcccaactctgtgttctttgactggtctcttaatctgtctgtgcctcatttccttgtccgtaaaatggggatagtgatcatagcatctacctcatgtttctgtgagaattgaaataagacctgtaaaacactcggcatcatgcctggcacatactaggtactccgtagacatcagctgatactaggcaagccctctctgcctgtacttttcaggattggcttggaatatgggtggaaggaggtgatagaacaaggagggcaacagctacgcacaaagaacacagatttcacattaggaccagagaaaacttcatggagagcagaggctgtgacctttcatttattctatctccaacacatagcttgatgcctagcacatagtaggtgctcaataaatggttgctgaatcatcagacaattgggcatgactggggagaggcacctcacaaaaatgccaggaatgggacaccgaccagagatgagggctttaatccccggtctcttcccttttcccttctaagggcagctagggcagaccctccaggtcagtggggccctgtatttccacaggtggctggagcctcaccaagctctccaggatgtcagccccaggctgtgcaccctcgaaggcagtaggcagtgctgttttcctggagggctgggatgggcattgtaatgagaaatagaaacctgcaaaaaaaataaataaataaaggtatgccaggccttcttgtttggggagctggtgccatttccaatgagcagtgtggcagtgggagataaggcagaaatgtgaattgctattgtgcttcactccacaagcaactagaggggttttctgcagggtgctttgtaataccaggtggcaacaattatcatgaactcagaatgggtgaacaattaagttcttcctttcttgctggttcctgttttacttgaactttccttccatccaacaatgcccaccacttgctatcaacaaatcaacaaaagcctgcatgtatgaatggagaacactgaggacagagtctcgggctgtgtgttcttggctctactgccagccactactctctgggttctgaccaagccattctccctgcctctgcctcagtttccctcctggtgaccttgtgagtggtctctgaggcaggtagaggcaaggagggttctgtcacggggtgtggcaaggatcagttaatattaatgctatttttttttttttgagacagagtttcactcttgttgcccaggctggagtgcagtgatgtgatctcggctcactgcaacttctacctccccggttcaagcaattctcctgcctcagcctcccgagtagctgggaatacaggcatatgccaccacgcctggctaattttttttttttttttttttttttaagtagagatggggtttcgccatgttggccagcctggcctcaaactcctgacctcacatgatccacccacctcggcctcccaaagtgctgggattacaggtgtgagccactgcacccggcctgttattaatactgtttttaagccctggatctgcatgtctcctcctccgggcgattacctgctgcatgctctaacactcttccttcacctccttacatctcgaagtcctggtagaatgtcccacacacaacatgtgctaattacacatttgtggctcattaagatgataagattgttctcctccaagaaccttgcacccacaatttcagaccagcttcacagtctccaagctgttcaccaatgtattctccagttcttggtctgagtatgtttcttgtttattcttctcaaccacccactacctccatgcctcttactctcgcctcaggaagttccaccagtccttgtcacctggcagtgacagaggcaggaaaacagctcctgcccaaagctggggcagtgcaggaacttccccttccaatgctgtcagccaggggagtgagtgcagagtcacccatagcaggtcgcatgtgggaattggggtgcggtgtcaggtgctggccatgcacagaatctggggctctgcttgccctggagttgctgatagacgcgcaggaagttgtggctgcaatgagagtgtcagcttttctcccactggtcaaggacacaaaccaagcccaccagtgaaaactctgcagcctccattcaaatgaacacagatgtggcagcttatcttccctggggtcccacaggagacttaacaggcttccctcgggctgtgtctgctgaagtcagtttgcatgatgctagaactgtcgacccatctctgtaaaaactgctgcttctacgggtaactaacatccctcaaaagtaagctcctatctaaaatgtttaaataacttttgtttcattataaacgttgaaaaaatacaaaaaggcagaagaaaaaaaatgtatacagaatctcatcacccggaaacagcctcctagtagatttctgtctttctcttctttctggtgggtgcatttcaatgccattaagattgtgcagaagctggacatggtggcacatgtctctgtagtcccagccactcaggaggctgaggtgggatgattgcttgagcccaggagtttgaggccagggcaacatagtgagacccgtttctacaaaaatcaaaaataaaaaattacctgggtgtggtggtgcacacctgtagtcccagctactcaggaggctgaggcagaaggatcacttgagcccaggagttcaaggctacagtaagctatgattgtgccactgccctccagtgttggagacagaatgagaccttgtcaaaaaaaaacaaaacttaaaatttaaaaaagattattcagtatataaaattatacatcctacattttaaacaccatttttctaaatgtgaaagtaataggccgggcgcggtggctcacgcctgtaatcccagcactttgggaggtagagacaggcggatcacgaggtcaggagatcgagaccgtcctggctaacacggtgaaaccctgtctctactaaaaaatacaaaaaaattagccaggcgtggtggcaggcacctgtagtcccagctactcgggaagctgaggcaggagaatggcgtgaacctgggaggcggagtttgcagtgagccaagatcgtgccactgcactccagcctgggggacagagagagactccgtcacaaaaaaaaaaaaaaaaagtaatatacatttactattttaaaagcttgaaaagctttaaaatgcaaagaaaaaccataagagttctgcccccctccagagttaatcactgttaacattttggtttattgccttaaactctattttaataatacaacgtttacttgtttttaagtgaatgacatggaaagattcacaagtcctaagtggacaatcacataaatagggagttagttgtgtaggaaaatgcgtatgtgagttggtaaactaaaatatgaacagcggctgtctcttggtggtaggattatctagtgatttttactttcttcttttggcttgtcaaaagtttccaaatcttccacaatgaatatgaatttagtagtaagaaaaaaaaccacaaaattatttaagacacagatatccagattcacaagtgtgtttccgagctgggtcttccttgccccaaaatctcatctcttcttactcatgtctggaagccagccttaggtgaagagtttggcaaggctgatgctggcagagagaggagggcaggacaggcagggcaaaatcccttggcttcagggcacttcaccctacaaaatctgaagggctccatgtccctccagcacacacaggacctgaggggctggagccgtctccacagcaaccataggatggagcgaggatgccagaaggacgggcataggggatggagtcactgcagagacaatggagggaagggcacatagggagaataagcatttcgatgcataggaggaatgaactctgtagggacctatggctgagtagatgaggaaagtaaattcatatcttatatctctgcacaccagctatttgtataaaacaatagcatggtggctgggtgcagtgtctcacacctgtaatcccagcactttgggaggccaaggcaggcagatcacctgaggtcaggagttcgagagcagcctggctaacatggcgaaaccccatctctactaaaaatacaaaaattatccgggtgtggttgcatacacctgtagtcccagctactcaggaggctaaggctagagaatcacttgaacctgggaggtggaggttgcagtgagtcaaaatcatgccactgcaccccagcctgagcgacagagtgagactccatctcaaaaaaataaaaataaaataatagcatagtcactaaatgtattaacaatattaagaaaaagagggacatgatgatatatttgtcaatgatttattcatttactttccatgtcattctcttggccttgttcttagaaaatctttccaatttcaggcattaggctgattgtcaacaccagtttacgctgattggtaagtttttgtctcattctgtgtatgtagatacatacaggtatcattatctatacttgtgctactcagagaatgtgctgctttttgcaaaaatattcacgcagaattcactgttcacatctgaaatctgtgattagccatatgcatgcctgaacactgagcatattaagtagccctgagcccaggttgcaggatggagtgtgctacactgattctactcgctcctagagattaagcccctcagagtttccatgttacactcccctgggcacctggggacaccaacaatctgggtcccaggacagatagaatcttgaatacttgtaacctattattttattattgactcattgctgtacatgttcactgcctggtatcaagagaaaatgtaatttgtaactgatatctctcaataatgttgtgtacttcctacaaagagacccactgatgagttcattaactgttatgtaactgatgctttacattgctttattttatttacaaattcttagtgggcttttatatgggtgttttaaagtgttttagtgtttttttttaaattttcagaataaaaatagttgaggttttaggcagccaagaaagcactattatttttcccacttaaaaagataagggtcccaggctccaaaagattgttattcgcacaatcccaggaaagaattagattgagatatcaatggatggctgcattttagtgagaaattggaaactgtattaaggcttcctggtcaaatggcattttcccaacccttcttgagctgtttttctctcttcttacttcctggctattgcaggagggtcctcccagtttttatctctgtaatttcttgggactctggggctatattactgtctaccttggtccttaatggctgatccctgaaagtccatttgacttctaatggaggagtctacaggctagacatgagtaataaatggtggtgatttgcacgttgcataacgaagaactgagtgagtgcctgtgggaaaggaaaggcagcccctccactctcccacagctaccttctcctctctcacacacacaaacatgtgcatacatgcactcttgtctttgtgctacaaacagcagcatacggagttaaatagcattaaagaaaccagttggccaggcgcagtggctcatgcctgtaatcccagcactttgggaggccgaggtgagtggatcacctgaggtcaggagttcaaaaccagcctgaccaatatggtgaaaccccatttctactaaatacaaaaaattagccaggtgtggtggcacacacctgtaatcccagctacttgggaagctgaggcaggagaatcgattgaacctgggaggcagaggttgcagtgagccgagattgtgccattcattgcactccagcctgggcagcaagagcgaaactccgtctcaagaaagaaaagaaaagaaaagaaaagaaaagaaaccagtcaatcctcctggccactggtaaaggttgttatcataggcatgatgtgtcagtgataactgcaatgatctcactattttctcatcaaaatagaatgttctaacaacaacatgggcagaaatagccttaaaaaaaaatcacactaatccaacaacatctgatttactttttagtcaaatattcatgtttagaccaaaactaataacatgatttttgtatcccctttcccctgaaaaatcccacctttcatcttatttttgaaatattatgtgtgtaataaatgcattcatttctacataaaatgtttgcatgttatatgttactccaggcagtggcaaactatagcctgtgggccaaattcattccactgactgttttggtacagcctttaagttaaaaatagtttttacatgtttaaatggctgggggaaaaaatcaaaacaggattttgtgacatatgcaaaattatataaaattcaaatttcaatgtccataaataaagtttggttggaacacagctatgcccatacatttacatattgtctatggctgcttttgccctacaatgccacaatggaatagctgcaacaaagactatgtggcccacaaacctcaaatatatttaccatccagttctttccaggaaaagtttgctaactcctatgttagtcctttgaaataagcaacaacaaaaatcaaaatgttatttgcataatattagtagaatacatgtgaccaaggtaaccatgccccagagcataaacaatcttaaatcaagaatctgagtggctgggcacaatggctcacacccgtaatcccagcactttgggaggctgaggtgggtggattgcttaaacccatgagttcaagaccagcctgggcaacatagtgagaccctgtctctacaaaaaatacatatttttaaattagctgaatgtggtggcacatgcctgtggtcccagctactcaggagactggggtgggaagatcccttgagcccagaggtcaaggctgcagtaagccatgttcgggccactgccctccagcctgggcaacagagtcagactcaaaacagaagaaaacaaataatctgagaaataattaccctctctcgattttgtttacctgcaaagaagctttcctgtggcaaaagctggggacaaagccttacagaactcagaagaattcacacacatgtcgtagtgatttgaaaactatgtccaatgcattgaggtaccagaaaaggttacttctttgtttcctataacttttacctcactgttgcttgaaggagaaaagggaagaggtcggagaggaagaggttacgagcttgccaggtgaatataattcagtcttttccagtttaccactgtcttagttgagttagtggtctttttttggtaaaatcatctttcaagatttctgtgtccctcccatcctcacctgcccttccattcatgtagggaaaagcttccatgagcttagccacaggacaggagttctcagatgcaaggacaggtctcttacacaggagtcaaagtttcttgtcccacctggtcgtgccctgctcccaactccaccatcttggctctgtctgactcccactggtgttgcaaatgctctgaatcttggcaatgtcctccctcctcccctgacctggtgtctaaccacagcctctgccacagggtcacaggtgccctgggtgatgccccgggtagccccacagcaagtgttctggctctcactcagctcctttctgcattctccactaggagcccagcaatacctgcaggatagtggcatctccattctctctgtcttcccccttcattccgccctttctaacccaccacctgggtggcatgtgctggatgcagcagttctctgggacttgatatttccccggtctatcctgaaaaagtaaggaacaaagccgctgctctgggattcctccaaactgaaacaaaacagagactagatgagtgcctgtaggaaaggaaagacagcccctccgctctcccaaagtcagcttctcctctctctctcacacacacatgtgcacacatgcactcttgtctttgtgctacaaacagcacaataggtacactacaaaccaggtacctggttattttacctcttgtctcctcttcccattctgtcagcacctcccttatgaaataatctgcattgtctctaccaaaggcttatatgtctaaactccagccctaactttccacctataaagggagcttttaaaattcagaaaataaacattatctctccccataaagtctgcatttcaaaactgttatttcaatatggagtcaatgaagtcagctttgcaaaccaaagccatcaatgacctttttattccaggcactgcccatcctcacccaccctgcagtttatggcttagccctaatggcggaaggctgtggaagaacaggatttacgggggtatgaaaaacgcatccattcaataattcaaaatattattcctgttacccttgctaagtgaaaatcctttgtaacattttcattcttttaaaaaaattacattttgcctcagcataactctttggtctcagctgttatcttagttgtctagggctttcatagcaaaatactacagacagggcagcttaaacaacagaaatgtgttttctcacagttctggaggctggaagtccaagatcaaggtgcctgcagggctggtttcctctaaggccttgctccctggtttgcagatggccgccctcttgctgtgtcctcccacggtcctttctctgtgcctgtatccctggtgtttctctatgtttctaaatttcctcttcttgtaagcacagtcagattggattagggcacatcctggtggctcaatttacctccatcacatcttcaaaggctccatctccaaatacaatcacattctgaagtaatgggagttagactttagtacatgaatttaggttgaggggagctggaggggggcacaattcagcccaaaacacaggttacctctcatttgggttgttgcccgtcttcacgtttaaatggcactctccccgtgtgcttgcctgtgtccaaacttcctcttcttataaagacatcagtcatatcagaccacagcccaccaaatgacctcattttaacttgattaccactgtaaagaccctataaggtcacattctgaggaggttgggactccacataccttttttttcctttggtggaggaagggacgcaatttggcccaacagtgagccaaagagtacacagtgtctaatattccagacaaagttgtttgggttctgggcataaacttctatttcctcagaataaaagcaaaaacaaataagccaaaaacatttttcaacatacccaggcttttatatgttgcagggaagggagtttagaggcccagcagccaaaagggtcctgcccatgtccacactccactgcctgaaggtgagagacagtgaatagaaacaaagcaaagctcccacaaagtggccaagagccatgaagacacagctgtggccaggaacccaggaggccagataatctcagaaaggagggagattatcatcaggccaggcccagtggcgcacacttgtaatcccagccactcgggaggctaaggcacaagaattgcttgaacccaggaaatactgagatggtgccactgcactccagcttgggtgacagagagagactgtttcaaaagaaaggaagaaagaaagagagagagagaaagaaagaaagagagagagagaggcagggagggagggagggaagaaggaaggaaggaaggaagggggaggaggaggtggaggaggaaggagggagggaaggaaggaaggaaggaagaaggaaagaaagaaagaaagaaagaaagaaagaaagaaagaaagaaagaaagaaagaaagaaagaaagaaagaaggaaagagaaagaaaaagaaaggagattatcagcctgggtgacagagagagactgtttcaaaaaacaaaaaaacaaaaaagaagggagattatcatcagagcttagacagaaagagagtccgaccccattagacctgcagaatcaaaatgtctcaggaatccaagagtttctaacctccaaggagatgctgatgctgcattttaggaccactccatcacctaaagtggaaaaaggcacaggtcatatctgcttcctctgtaattgttcagccctaatctcatttaaattctttccccatgttagctcccaagatagggaacctcccagaatacactaacaatatagttgaccccattttcaaaatggcaaaattgcagccatctctccaacattatgaatgaactgtttgggagaagggggtgtcgcctctacacactttttgaaatctacaccagtttttttctaattgaactgtttctcataatctaaaattttgcaagttttaaatatgttttcagtacaactctctcacaagtgatcatttttgcaacatttcctgtgaccaagaaataaccgagatatgcctcacacttgtgttacattcactgattttttttttataacaaggtggtactcgaaatgggcaaaccaatctttctttttttttcttgtctgagatggagtctcgctgtgttacccaggctggagtgcggtggcatgatcacagctcattgctgcaaccactgcctcccaggttcaagcgattctcctgtctcagcctttcgagtagctggaattgcaggcacatgccaccacacccaactaattttttatatttttagtagagacgaggtttcaccgtgtcggccaggctggtcttgaacttctgatctcaagtgatctgcccacctcagcctcctaaagtgctgggattacaggtgagagccactgcgcccagcccaaacaatctttctatatgttcatccccgtaaacctgctcaaagcctacattcaccaacatcacacaggcatgactttttttttcaacagatccaattgacaggtgagttccaaagggtaacaggcctctgtcttaacatcttcagtgattttaaatgtgcatctaaagaacaagacacagccagttggatgagctctgtgtatggccatagtctagcaaatgcaaacacaaacagcggtgcttagcttcactgatgacataagtttagcactatgaaccagaagtagcttcaaaaactactgactttgctccccaagccagagcattggcttgattactataattacagcaggagataaaaatcagtatagtctaccatatgatttcatgtatataatattctcaaaatgacaaaactgtagagctagaaaacagattaccggttgtccaagggtagggatggtgaggggagtgtgagcaggaccttgaggacaaggcttccagggaggcactcttgggacctccactgctctgcaccacctcaagcatctgctcctgcattctagcacggtgctccttggccatcccagctgtaggttaagcagaaccaggcgcatcgtgggctgccactccagagagcacagggcgtccacatggtgctaattctgcaggctcacagagtttagaactatggggctatggcagccactttctagatttcaaagggtgctatacacagctgggggttccaggaagaaacttgctgcaggagagtagcagccatgtaaagtccccactagggcaatgcctagcagagctgtggagtgagatgaccactgaggccccagaattgtagagctctcagcgggcaatgccagcctgagagagctattgggtggactgaacccagtaaagccattggggtggggctgcctcaggcctcgggggcccaactactccctgaagtgtgcccacaatgtgggtcatggagtccaaggagattattctggcacttcaaaatgtagtgttgttttccctcttgggtcttggacaaactggggagcagttaccctttacttcttgtctatttctcccttttgggatgggaacatctatcctatgcctgtcccgccattgtattttgaaagtagataactcatttgatgtcacaggctcacagctagaggaaaatttgcctcaggatgagtggtgccttgagtctcacccacatgtgatttagatgagaccatggactttggacttgagttgatgctggaacacattcatgtgttggaaacttaatccccaatgcaacagtgttgagaggcgggaccctcaagagacgatgaagtcatgaggtctctgcccttataaatggacaatgtccatgtggcaagaatgagctcattattttaggagtggcatccttgtgaagaatgaattaggccttcctcctgagcatgttttctctctctctcaccatgtaatgccttctaccatgtcgtgatgcagcaagaaggccctcaccagatgcagaccctcaatattggacttcccagcctccagaactgtgagccaaataaacttctcttatctgtaaattacccagtctgtgttattctattatagcagcaccaaatgaactaagaatgacatgacactgagctttcactatggtttctactggtccttgttcaagaacttgagtagattgacagggatgtgagtgtatgtgtatgctgtgcatgtgggttgtgtatgtacatgtatggtgtatgtttgtgttgtgtgtgtgcatgatgtgtgtttgtgtgctcctttcttgagtcagtgtaattattcctgtcccctctgtggtccacagctgtaagaaaataccctcacacagcatcgccatgttttgtttttctagtccttctctcacgcaagacttcaatctccttggggccaatgattgtgttcatctatgtgggtcagctccaagcacaaagctagaaagcatttgagtgaaggaatattgacatagggaggaagtgaaaagactacattttccaagcatgacattacatccttcgcacagtgcaacaagcagacaaactccaaggctccatgttaaacacacacacacacacacacacacaccacacaattggttttagcaacaaaatttcagcccatttaaaacctttggtgttatgttctcactcataagtggaagttgaacaatgagaacacatggacacagggaggggaacatcacacactggggcctgttgggaggtgaggggcaaagggaaggagagcattaggataaatacctaatgcatgtggggcttaaaaacctagatgacagcttgataggtgcagcaaaccaccatggcacatgtatacctatgtaataaacctgcatattcagcacatgtatcccagaacttaaagtaaaaaaaaaaaaaacaaaaatcttgtggtgttatatgttctcaagaaagactttggggctgatctaaggaagtgtgaatattaaacaggcagttggttaaaaaacaatatctgtaatacttcctgcctttttattcagaagaaatcaatatctgagtgctcccagccagattcaggtcagtctgaagcaagaatgtgaagtaaatacagtgtggtcccaaattcccatttatatgatgcttaggatttgtgctggaatcaatcgtttccttgaatgctgaaaatataccttcaattttaggtgattgcctagaaacgatctgatctcaatttgtttgttatgcccgtgcccatcatgaaagctagaaaaaaatagtattaggaaaatccaacattgcagacaggtgcaaacatccctgcctgactgcactgaccagacctaacaggcaggtagtgaccaaagagccaacaggttcagtgacttgaggattcttgtttgagggaggtgggactggtcgtataatgttataaaggcaaggcaatattcacagtcagtcaacagcacctcacttccaaggatattccctcatggctggttatttgtctgtgactatagtagataaatggctctcagctccactaagcccaatgccccctttcaataataaatgttttatattactccctttcctaatctgaaataaaattaatagcttatttatgctacctgcatataatttttttttttttagatggagtctcactctgtcgctcaggctggagtgtagtggcacgatctcagctcgctgcaacctccgcctcctgagttcaagcaattctcctgcctcagcctcccaagtagctgggattacaggcacccaccaccaacatgcccagctaatttttgtattattagtagagatggggtttcaccatattggccaggctggtctcgaactcctgacctcgagatccgcctgcctcagcctcccaaagtgctgggattacaggtgtgagccatcacgcccggcccctgcatataattgtttaatcataatgtcttaattgggaataaaaagcaatgtaaaacataaaaacatataaactcttacagtatgtaaagatttgaacactcattagaaaacatattaaagtgtcaagtgcttatggtcatgttgaatgtggcagttgtaagtgcagacccatatatgcaaatttcattgatgatttgaacacctcatatgtggccttgtcactggtgatggtaattttcaatatgatgaacaattcttagtaaagtttttgacgaaacaaaggacaaatactctatgattccacttatttgagggacctggaataggcaagtctgaagagacacaaagtagattagaagttagtggtgtctgggagggggaggacggagagttattgcttaatgggtacagaatttctgtttggggtaatgaaaaagttttggaatagataatggtgatggttgcacaacattgcaaattaatgccactgaattgaagtggttgaaatggtaaatttttggttatatagatcttatcatatttttgaaataccaaaaaaaaaccttggaaaacctttgtgtttatacataagatggagttagttctagctcagagaatgaataagaaatggtctttcacctactggaatatccaacaggatgtttgaaagcacgcaagacgatttcctgcgcttcacgggatatctagcattgctggccaacgccgctaaatgccagtagggctaccctttattgataaaaatgccctaccaagttccagccatccccaggagggaaatattgcccatcctgagaaccactgagacacagaaagtgagagccaggtaggtgtctgggttctggtcaagtgaacgcctgcagtcctcgtgggaattagagtgctctgcaaggaaccagcagaaatctagttctttgagggatcaatgtggaggacgaggagatggggaggaaggatacagcaatgtcgcatgaaagccgcttccagttcccatccctgttccctggtttcttgggcatcaagactcattgcagtcccctgccagagggtgaagctagagagccttgcacatttgccagtcctgtcagttggctcaggattgaggcagggctgactcagcccttagagatgacacagcagtgcagctgactatgacaatgacaataacagctactatttattaaataattggcaaggctttactattttttcatttaattttagcaaccaattatagggtgaaaacgggttcacacagatgcaaggagcctggtcaatcaaaaatcattgacacctggcagggcaccaccgtcacagagattcccaaccaagaaatgcaaatctcccgctgttgctaaagtctcacttggcagctttcccagtccagtggccacagagctccttctcccctctgcatggcttgtggggatttcagctgggaggctgagtgcagtcacagggcagtaggtttaccacttccccatcagccactgccctccctgcaccctctcctctttcttcccaccacaaggatgagtttgatagagtcgcattcaacccaccccatgatgccatctcaagggtttaaagcctgacctaaaaaatagggacttctcacgagatgcttggcaaccccagctgcagggcctgggatctcatactgtggctgccagaatcaatgtgctgacagagctccccatccactgcatatagggcttacttctttttgtttgtgtttcttgagatgcagttttagcctgtcaccgaggctggagtgcaacggcccaagttcagctcactgcaacctccgctgcctgaattcaagcgattctcctgcctcagtctcctgagtagctgggattacaggcacatgccaccatgcctggctaatttttgtattttttttttttttttttttttagtagagatgggttttaccatgttggtcaggctggtctcgaactcctgatctcaggtgatccgcccaccttgacctcccaaagtgtcgggattacaggcgtgagccactgagcccggcctggcttacttctttttctattgctgaggctttttgctgacagctggcttgggatctcaggcacagaagccggactcaatgtccctactgttactctttctacccctttacagggtccctaagtgcccacctgatgccagtttctttgcctctccaccaccccagaggaccctttgatgttgtcccatacctttaacccttcttctgccacaccctcaactcctagccctcatagaactctactgccaacagcactggctgcttcctcagttattttctttctgtgcatgaaatcttcaggagcagaaccaagtcttctgtgttctttaagcccttgcccattctccactgtaattaatgcaatgatgggtacatgacacacaataattagggcaattgcctttcgttcacactttcacagcatctcctttgatcctcaccacaacctcgtcaggcaggtattattgttgttcctattccacagaggaggaaatgtgagacctgagtcacaacctggaatgaggcagaaccaggtcttgacttcggtcctctcacccaagctgcagtgccctcagcaagggaccggagcacctgctggggaagcctctgagtgagtctcctaacaaatcatcatattgaaaagcacagtgtccaaagtactttagcagttcctttaaaaagtaacaagatttgtactttctcccaaagtatttaaataacttcacatccatgaacagttggaggtataggatttcagtaagactcacagagcaggtgttatgtttcctatttaacccagggagcaacgaagaagatcattgctctctaagggtcccattctgcgtctctagacaggaaagaatgagagaggccctgctaggggtggcccataccccttcatgcccctgtgtagtagttggagccaaggaacaattacaaaaggtacaagaggctgggcgtggtggcacacaccagcaatcccagcactttgggaggctaaggtgggaggatcgcttgagcccaggaaatcgagatcatcttgggcaatataaggagaccctgcctctacatgaaattgaaaacttagccagctgtggtggcgctagcctgcagtcctggctacccattgcttgagcccaggaggttgaggctgcacaacctcctgggctcaagtgatcacaccattgcactccagcctgggcaacagagtgagaccctgtgtcaaaaaaaaaaataaaataaaaataaaagatacaagatacagagttcagaggcagatacacagatccaaataaacaaagtggaatcaaaataaaacaatgtagacatttatagctataggaattcctggagtcagcagccaggagtttgggagtccagttcctggtgggtgagattcagtgttcttcaggtccaggccaacatggccatccatactgctaccaggggctttctgtgtcaaaatgcagaggctgaaccaccaggatcatcacagagagcaatgcatagaaccaagtggaaagtccaaagcaaatcatgagtcgaaacgggcccagtgaacaggaaaatccagatgtggatttggcaaccaatggagcaagcagagccctagcaagtggaagagaagtagggcttggagtcatcaccaatacccagctcctgggcaacgttgtgtctcatttctcttcctgtccatagggtaaggctttgttagccaggattcaggggccagcactgtggatgagaagttttagtagctgactccaggaggacagagagcaagttcacacaacaaacaggtgatggcacctgcaaaagagcactagcttcaaaaatcagtcagattcctttctcttcagccagttttgaagagggcaattatcaaatgtcaacattctaattggtctccaacactcctgctgtggtctgaatgttggtgtcccaaaaaaattcctatgttgggacataacccccagtgtgaaggtataaataggtggggctatctacagctataccaacctgaatgcatccgatctcacctggccttggaagctaagcaagataaagcctggttagtccttagatggaagactgcctgggaatactgggtgctgtaggcttaaaaagaaaaaaagaagtgaggcctttggaaagtttttaggtcataagagctatcctctaataactgggattagtgaccgtataaaaggggcaaaagggtgtgtttttgaccctttcaccatgtgaggatgcaacaagaggcaccatcttgaagcagaggcgctgaatccgctggcaccttgatcttggacttcccagcctccagaaccatgagcaataaatttctgttattaggctagtcatggtagctcacacctgtaatctcagcactttgagaggccaaggcaggaggatcacttaaggccaggagtttgagaccagcctgggcaacatggtgaaaccctatctctacaaaaaataccaaaaaaattagttaggtgttgtaatgcctgtagtccaagctactcaggagcctgaggtgggaggattgtttgagcccaggaggtgaaggttgcagtgagccaagatcctaccattgcactccagttcgggcaacagagtgagactctgtctcaaaaaaatgatagtaaaataaaaatacattttggttgtttataaattatctagtctaaggtttttgtttgtttgtttgtttgtttgtttgttttttgttttttgttttgttgttgttatagcagcccaaatggactaaaggcaactccacaatgaggcatgattactcttccttcctgaaaccttgggattatacgttgccactatagaaaagaagcacctttgtacagcttctagaaattcaagctggaaatgctcccagagagaatagtagggtcaacctcatatccctggtcaggctgacccccatccccctcccagctcaaacacaacctgagttatgttcaaaggagatctcaaagcaggatcaagccttttattactttcttccagtattttttattcttattaaatacatgatattataaataaactaataggactctaaaggaatggaaaaatttgtcccacactatcaacactccaagttgaactgctttttgttggttcaagttcattttcgtttcatttcattggcatgtatcatttttatgtagttgaagtcaatgtcatgtacagtaaaatgtattctctttatcacttacaattaaatcctaagcacttttttatgttatatggggtcctcacaattgttattggctctgtatatctcacaagaggttatactgcataattcacccagtcacccagcaatccttttagattgctttccatttttcactgttggacctaatgttacagtgaacagtttagtgcattactcagatcaccactcttgaaaagagtctgggagcctaaaagaaggttgaaggtgaagtactggcaatttttcaggcacctctttccacaagatgatatgcaatgggcatgggctgtttctggcctagtagggagagagacgggggcggcaagaaaaatggacgatgctgggtttgttctacagttgacctcagacagtggtactcatcttttttagagagaagtgaatgggcaggagtagttgtctttttgaggaaaggtcttacgaggcctggggcaaagatgggtcacttcctggtccaggcgtgaaaaccacagtagccaggagtcggggaaatacaaaaatggcccataagtagcattttcatgcagatggggcagcagaggcagagtgaggggcaacccgctaacggctgaggccccacgagcaggctggagcagggcagaaggagacttggtccttcccacatgcaagacactggcagagatctcccagaactgatggagggattctgaggcaagggcttagctcctccagttatgtagttgacccagtgagtgtgtggactataggcatcaatgttaatgggttctcatctgtacccacaagccagacaggctggaaagagtcaagggtttggatagttttccttttgggttattttcctaggatagcttcccagaagcaggatcactgggttaaagggcaccaaagcttttttcctgcggaattcccatagtcagttctcaggcccagcttccatgttcttcttgtcttccctgccctagtaccaggagctcaaccccattttggtttttattttgttttttgtttgtttgctttgtgtttctttgtttgttttgtttgtttgttttttgagacggagtcttgctctgtcaccaggccggagtgcagtggcgtgatcttggctcactgtaacctctgcctccaaggttcaagtgatcctcctgcctcagcctcccgagtagctgggactacaggcatgcgccaccacgcccagctaattttttgtatttttaatagagacagggtttcgccatgttggccaggatggtcccgatctcttgaccttgtgatccacctgcctcagcctcccaaagtgctgggattacagacgtgagccactgtgcctggcctgtttctttgcttttgaggcagagtctcactctgtcacccaggctggagtgcagtggagctatcttggctcagtacaacctccgcctcctgggtttgaacaattctcgtgccttagcctcccaaatagctgggattacaggcatgtgccacaacgcccggctaatttttttgaatttttagtagagactgggtttcaccatgttggccaggctggtcttgaactcctgacctcaggtgatcagcctgcttcggcctcccaaagtgctgggattaggggggtgagccaccgcgtctgaccttgaccacttttattttctctttagtgctgccccctccctcttccccatggggagcttctccatccaagaccacctctgaccctcacccttgaaatatctgcagcaactctgtgttatgaaagtattagtaacagagttgcatgtaccgctaatactactgtgattttctttatttttagcctatgtgcataaggaaaggaaatgctagatctctgagagaggttaataaaaagaagatgttgttccccacctcacttcccttgctggttattaagccagtcccccattttctcacttctcctaaagacaaattctgagtccatttcattttaagtattactgcaagggcacaatacagttgtaactgagatgtttaaaacaaggggaaaagcacacaaacatgaaagtcttactaagttttgaggggctcacttctgtttttgtttctgaggtgaggtcttactttgtcattcaggctggattgcagtggtacattcacagctcactgtggcctcaaacccgcctggttcaagtgaaccttctgcctcagcctcctgagtagttgggactacaggtgctgtattagtctgttctcatgctgctaataaagacatccctgagaccaggtaatttataaaggaaagaggtttaattggctcacagtttcacaaggctggggaggactcacaatcacagcgggaggcaaggagcaaagtcacatcttacaatgtgctaggcaagagaagcactgagcaaaaggggaaaaagccccttataaaactatcagatctcatgagaactcactcactgtcatgagaacagcagcatggtggtaaccacccccatgagtcaattaactcccaccaggtccctcccacaacacgtggggattatgggaactacaattcaagatgagatttgggtggggacacagccaaaccatttcaggcacacaccacaatacctgactaatttttaaaattttttggtagacacaagatcccgctatgctgcccaggctgatctcgaactcctgggctcaagcaatacttccaccccagcattccaaagtgctaggattacaggtgtgagccactgtgcctggcaatcttactaagttttgatagtcacaaaccctcgcttatgatccctgattctttctcgagatgggtactatctaactaactgagacatcagatgctgttaacctagggtccatgttgaagattcaaggagtctatattggtcagggtctggcttggaaaactaaacaccaccagttacgttaacagaaagaataaaggaactgattaattgggtattggaggactgaaagacaaatgagagataccacttctatcagaaatcataactgcaggttgggtgtggtggctcatgcctgtgatcccagcactttgggaggcctaagtgggtggattacttgaggtcaggagtttgagaccagcctgtccaacatggggaaaccctgtctctgctaaaaaatacacaaattagctaggtgtggtggcacacgcctctaatcccagctaaggcacaggaatcacttgaacctgggaggcagaggttgcagtgagctgagattgcaccactctgctccagcctgggggatagagtgagactctgtctcaaaaaaaaaaaaaaaaaaaaaaaaagagagagagagaaatagagagagtttgaaaactacagctcttgcatttagcatctatatgcagacacaggaagtgcactcagcaggcattcctactagactgagtatgcccggcttttgcattagtcagaaggaaccagctaatacccactcagatgagtttttagagaagagtgttatgtatggggctattgatgtaggtaggatttagggaacccagggagagatactatggcacctgggtccattaccatccatagatttgtatatagtttggatattagtccccccaaatctcacattgaaatctaatccccagtgtaggagatggggcctggtgggagatatttgggttatgggggcagatcccttatggcttggtgttgtcctcacaatagtgagtttcataagatctgtcttaaagtgtggcacctcccgccaccccttgctccctctctggccatgtgagatgcctgcttcccttcaccttcagtaatgattggaagcttcctgaggcctccccagaagctgagcagatgccagcaccatgcttcctgtaacagcctacagaactgtgaacctcttctttattaattactcagcctcaggtgtttcttcatagcaatgcaagaatggcctaatacagatgtcaagaaggaaagggaaggagtatccagaatccagagatgatgggtttattgagtgggtgcttgaccacagctgaagcctttggagagggattcagccaatctgagaatgtgttagggaggccaggagagtagattctcttaccatgctctattcaattccttgcaagtaccacccagtggccaaacccaagcagaagccagaggcaaggaatatactgatgttgccccagtggtcagctagtaaataaacatttaacaacaagctctgagacatgtatgtgtgcatgcatgcttacttgtagtatttgccagtgtccatagtgtaaatattcctaccacagtcaccaaacacggagttaggaggagatgcatacaatcagttcttgcaggctctagtgctccactgaagtaaacagatggggtcagcctcccacagcacagacagagtagagaaggatggagagtggatctggaagggcaaacaaaacaaccagtgctgctgcagctgtcgacatcaggccaatggttctgacatctggagcaaggacatcagggcctccaccttcaccatcaacatatctgtcatttccaaggctaatagaggatggttaaggaaaataaggactcagcaggttagtaatgtaggagagagaggagatgagacagggagagaaagagagacagatgtcaattccattctaagctaaggctgggaaagacctgcattcttcacagataccatgctgtaagcacagagaggtgaagggtagggagttgtgtttctccaacttcaattaactggtagctcaatagtatctttcagacagctaggggtggatcccatggtgagagaaagagtggcatgttagaaatggtgttccaagcagagccaggacataatataccatctggcactgagcccaggtctcaggaagagtggcacactagaaatggtgtcccagggtggggccatctggtactgagctccaggtctcagaggtcataatatcctcctgttacctgctggcttacaagtggcacggagccattaaaccaatggttcatgacctcttgtgggcccatgttggctgagccattgctgaagagactgggattctgtgatgcttaggaccagctctctgggtcctagtgctgttcttctgtatgtagaagcacacccaagtctctgggtaaaaagcattgtgacataagagccccacagccaccccctgcccagcagcacaatcacgactgatctgcctgccatcaccattctccacatcaatgtcgcaagttctccttccaagactggaaaaactggctctgtaaattcttcttatcgtatggcagcctcctcatcctagcctcaaggcgcaagttcatagagattggagcacagataatctaagtgagaagcactgagctatcctccagataacctccccttcccaggtcccacccccagctttcatgtggtaattaggaaaacaggtacctggatggggtgacaggggtttgggcttgatgtcccaggcagcagcaccatgatcttgccacgcaaaactacaggtgtagaaactggcccaaacagagccaggtgcaaaagacgaccccttaaccattaaaattttacttttaatggacaaaagtaaaatgtccccccctctctcccacctaccgtagctttaacagtctccattttcctctcagaattatgcactgctgaactggtgatgggtatttctattgacaacttccccgccttaagatccgaggaggtttctaaagcatctttctctactgtttacatgaaaccaaggacactgggcagacctcccatcagagcattgttaaagagaatacaagtgtcatagcacctatgaaaatattctgggctgggcatggtggctcatgtccataatcccagcactgtgggaggccaaaatgggtggatcacttgaggccaggagttcgagatcagcctaggcaacatggcaaaacccaatctctactaaaaatacaaaaattagccgggcatggtggcttgcccctgtaatcccaaagtgctgggattacaggtgtgagccactgcacccggcctatggcagttatgttttataaagccactaaaacatgactctgcaagtactgagccattgctcctagatggaaaaaaacaaaaacaaaaaccaaaaacagcattacatgcttataaacctctttctggtcatatgttaatcaactgatcagtatataaccttgctttatgtgtgtttctgttcggagacaccttatttaatatatgttgctgattcattaaccttgaactcatggttaaaagcactgtaacttatgcctgagtgaagcttatctgacacatgtattttctcaataaggtacagcacagccttcttgtgcttaggaacactagacatctccttagtgctatgcttggggaccatctgaaacagtgaaatcaccaacaaaagacacaaaaatgcaaaaaaaaatatggaactaaatagactacaaaaagggtccttgtttaccgtgtgagagctgaaacaagaggcagattattgtcttggtccaccacagctgggaacatgggtgtcaggttacccaaatgtttcaccactctgcacatatctgagtatgaccatggaagcaccatgagtattgactgatttcgaagttacaaatacatgttagttagtaggtgaatttgcaagtacagaatccacaaataatgaggaccgactgaacataaaataagacagtaaataaagcatttaaaaagaaaataaaaataaaatacacatttaagatattcagtgttttcaaaggcaaatgcaaattactgtgatagcattaatcacctatcaaatcatcagaatagattagaatgttggtaagcatgcaaatatccgctaactctcttgagagaaaagtcatagtgaataaccaaaagccttaaaaatgttcagattccttgacctaccgttggaaatcaaggaattctaacctaaattaataggcagagatgtaccccaatatttaattacaagaatatttatctcacaaaatgtataatagctaaagagaaattataattagcttaaaagtcctgtaatagagaattggttaactaaattatgatacctctaaaatgaaataccatgcagtcttcaggcagagcacggtggttcactttgggtggctgaggcaggcagatcacttgaggccaggagttcgagaccagcctggccaatatggtgaaatcctgactctatgaaaaatacaaaaattagctggatgtggtggcacatgcctgtagtcccagctacttgggaggctaaggcacaagaagtgcttgaacccaggaggcagaggttgcagtgagccgagattgcaccactgcactccagcctggacaacagagcaagactctgtctaaaaaagaaagaaaagagaaagaaatattatgcagtcttcaatcagaatgttgtagaatgatattaaacacttggcaagttgctcactctaaaaggctaagttcacttttaaaaattagaccatagtttatagatttgattctatttttatgtgtaaaaaggggaaaaggtaagactcctaattatttaaataattgtgaaaaaagacacgtaactactttaaaggtaaacttcttaacaaaatcatagcaaattaggatggaatacaagtctatttaaagaattaatactataatgccaatatcttattttgatactaaatcgactatgttagtcagcaaaaagacagataccagtattatttgagttctcacccatgagactggataaagaaaaaagtaaccaagacatgattattcaaaggaaataaatatcattacttatatgttatttatttgtgtacctacaaaatccaactgaatcaataaaaatcttgtagaaataattagaaagttagatttctgacaaaactaaatacaataagcacacagtatgagagctgaaacaagaaggcagattggaaatctaggaattttagtctaaatggtcaatgatgtaactccaagatttaattatacaaatagttatctcaacaaaatttataatagccaaagagaaatcataagcagccaaaaagtcctattctaaagaattggttaactaaattgtgatacctctaaaatgaaacactatgcagtcttcaatcgtaatgttgtagaatgatattaaatgccagaaggatgaaaagatgtgcagcatccctggtcattaaggaaacgcaaattaaatctgcaatggtatatgtgatggttaatactgagtgtcaacttgattggatggaaggatgcaaagtattgatcctgcgtgtgtctgtgagggtcttgccaaaggagaataacatttgagtcagtggtctgggaaagacagacccacccttaatctgggtggacaccacctaatcagctgccagaatggccagaatatgaaacaggcagaaaaacatggaaagactacactggcctagcctcccagcctacatgtttctcccacaccagatgcttcctgccctcgaacattggactccaagttcctcagctttgggccttggactggttttcttgctcctcagtttgcagatggcctattgagagaccttgtgatcaactgaattaatactctttaataaactcatatatatatatatatatctcctattagttctgtccctctagagaaccctgactaatacagtaggctaaactatgacgtttggaaggtaggtgtgttaaatgtattttcaacttatcatattttcaacttacaatggatttgttggggtgtaacccattgaaccttgaggagtatctgtatatacattttttctacagttatcatagagcaatacaattgttttatatttaaggttagcagtgcattagattcttcttatttttctacataacttttataaaaatagatgttacggccatagaaaatgcctttaaaaccttgagccttggccaggtgcagtgactcacacctgtaatcccagcaatttgggaggccaaggcaggtggaacacttgggtccaggagttcaagaccaacctggacaacatggcaaaaccttgtttctacaaaaaaaaaaaaaaaaaaaaagaaattattctgatatggtggcaagtacctgtacttctagctactcaggagaccaaggtgggaggatcacttgagtccagagtccaggacgtcaagtctgcagtgagccatgattgcaccactgcactccagcctgggtgacagaatgagaccctgtctcaaaaaaaaaaaaaaagatagtcttaatttactcttagctatttctgctgtttccaactattcccaaatagataatgctggtagaaaccttttcatgactatagtttttctggtctgctagattgctttttggatgatgcctaggagaaggattttgaggctgcaggacatgaatgctcttatgcctcttggctatgtgcacaaacacttaccaaaggttcaagcacctagtaggtgctcaataaatgcttgttgaatcccaataggcatgctggtttccaaatgaccatgctgacagcagtatttgaggtgtgtttgttttcctcttcaacaactggattggtttgggcaggttgtttaacatttttaagcttcagtttcctcagttgtaaaaagagtaatcacagtctaattttattgtgaacttcctatcccttctctctggaacatcagggaaataccttggacaaacatggcagagaaaggtccctctctgcttagtcccactcagaccctgtccagtgcccctggttttgcattgctgcccacacaacatcccctttgtccttcaccttcatttcctggcgtcattgctctaaatcctaatggcaaagttctcacaacacagtcactgcctgctttgcctccatacagccagagttgacatggactcatctctctgttctgctctgtggtagatgaggagggctggatgttgctctggatgggtgggatggaatggaagcatattccagttcagggagaacctaattggattgagggaccaggaccttcaaaggacctcttcaacatgtagaagccaggactctataccacttgctgcactgcattatcaaacatcttcctctgcacttactagcctgagagtttgttcatgtgaatgatgctcttttaatggttcccataaacctttttttattttattagaaaaatatattttttaaatatatgtatataggataaaaagtcatctagtactaccaggtttttttgtttgtttgtttttcattttgctttgtttctttgagacagagtctcactctgttgcccaggttggagtgcagtggcgtgatctcggctcactgcagcctccacctcccaggttcaagcgattctcctacctcagcctcccaagtagctgggattacaggcgcatgccaccatgcctggctaatttttgtattttttgtagagatggggttttgccatgttggctaagctgatctcgagctcctgacctcaggtgatctgcctgtctcagcgtccgaaagtgctggaattacaggcatgagccaccacacccagctgtactaccaggtttttaacaaaaaatgtcaactatgtccatccttccttattctcgactgctgcttctctgaagcagccgctctgaactcttttaaccattgtttccctaacagttgcctctatatttctaaataagcttttaagaattatagaatgtcttggatctggttttcagcaaggccagtattatttgttaggaagaaaacaaatttattagaggattttaagtagcttacagtattttggacattctgaaaaaagaaaaaaaaagatttgaagctgaacttccagaaataatgccccaagtcatgccacatattagcctggcagggaaactgcagctactgataccaaacccacaacgccaggtcatccttagatggagcccagaggtatctcaatcaatgtctgtgtgggagccctatcaaggtatatgtctatgtaatacacaggtaaactcaaagtcttatggcacaatgccctatagcatcccttcaaattacttctgccacctcctgtgccagcctctcacccagtgcgtttccttttctttctttcttttttcttttcttgagacagggttttgctttgtcacccaggctggagtgcattggcacaatcacagctcactgcagccttgacctcccaggctcaagtgatcctcccacctcagcctcccctgtagcagggattacaggcatgtgccacgatgcccagctaattaaaacaaatttttttgtacagacagggatctcactattttgcacaggctggactcgaactcctgggttcaagaaatcctcctgcctctgcctcccaaagtgctgggattacaggcatgagccaccacacccagccacattttcttttcttgctcacttttcccaagtgtgtatgtatattggtattacctagctgtaagctgaaatgtgacatgcaaagaattattaccttctcacaaagagctttacaagccagggtgtggcttacatactgtctacttttaatgtattaatcattgttattttaaattgctggtcagataatgccaaccttattatacctaagtctggttctgatgctcattctgtatactcaaactgtggtggggggggggggggtttgtttgtttgttttttgttttgttttgcctttttgtgtgccttgcaattttttgttgaaagtggacatgctatactgggttaaaaaaaaaaaaacctgctgtaagtcaatctttagtggtatggtggtaaggtgtggagggagggggagcactctatggtcccatgaacaggtctcagtcttttaggaagcttgtacctctggactgtgcacttcaagtgtgcttctcacttttccccgcttaggaggaacaggatggctagagggagctagagttgggtatttccctttcccaggtcacttaggctctgatgcaagaggttctcctgagagcagaccttgtgaagaacagagtgctctgacatatttcaccatggtttcttttctcttccccttctggaagcatgaggcgattttttttttcctttgatcttcactctgagaacaccttagagccaccggagttaaaactcacaaaagtgggagtgctcccctctaagactggtcacctccctgaaggtttttactctcgacttgtccactctgagtctccagcaattcgttacttacacttcaggtttctctacttgtttctgcagaagtttctgctcatgggtttcccctggagtaagctgtggttctctgtacctgcctgtctgtctctccaagcaatatgacctgtgaccttaatcctctgatggacccaagaagagttgctgaattgtagtttgttcagctttttacttgttaggacagagtgatggcttccaagctccttatacgctggactggaaacgggagtcttctcctaatggttttgaatgttctaaaatatttctctgccaggtgatgatgaataaagctaaataaaccctaggcaacctggtggattcattttatatgtgtttactatgctttctttgagactacctgaaagattagaaataacatgggctttggacttggacagacctggtttggaaacttgatgtgtctaataactccctgtgtgactctggatatgttatttaataatctctctgagcctcagttttctagtatgtcaaatggaaattggattatactccctatggaattgctatagttactgatgagtctcttctacccttttgtttccttaaatttcttttatgctttactattctaggtcacttctagttaccgtctttcctgcttcttctttcttccatgttaagccttcaatgtcattcttgtctgcatgtaaggatataatccacaggtcgatgctttaaatcatgttcttaggcaaaataagcatccaggaaactctggcataagcttagatctggttgaaatttacaaattggtgatttctctgtatccaacccattttcttttctgaatcactggaataatgtgatgctccctttattttccattggtacaaattaaatgatgttaagtagcatctggatttcaatgtccacaacagtgttgagtgtatttttgaggatggagttgggtttggttatgcaaatcccacagcttctttccccccaaggcttgctaagtgaagtgcttagactcttggaggttcctcattagggagactccaggacacacccagatgagtacatttagtttgtttctagcaaacattccttgttagatgagctaaaaggtcaactatttattaaggtggagcaacaatgaggtgagccctggctgagtcatgggctgggagttagaacactttgaagctggtaatggttaggctcaaagtcagttgtatttcttcctgttgctgttccaaaggcatgaggaggagatgagaaccaacaggaaaaacagcaaatgatggggaagaagacaaaaggtaaggaggaaagaaagacaagaaggaaacctgaaagttacagaggactcattgtatatcaggaactgtcttatgcatttcacattgttctctcattttctccttaaagccaccctctagagtagctattactacgtctatttccgggtggaagtaaatatgtatcagaaagattggtcaggtgtggtggttcatgcctgtaatcccagcactttgggaggccgaggtaggtggatcccttgaggtcaggagtttgagatcaacatggccaatgtagtgaaaccctgtctctactaaaaatacaaaaaaaaattagccaggcattgtggcacatgcatgtaatcccagctactcaagaggctgaggcaggagactcacttgaacccaggagttggaggttgcagtgagctgaaattttaccactgccctctagcctgggcaacagagtgaaactccatctcaaaaaaaaaaaaagaaaagaaagattaagaaatcaccaccttcagtcacttaacaggtaagtaatggagctaggtctgggattcaggtcgttggaatccaaccccaaaaccttcttccttgcattcttccttattttcagccaagctgtttgtctaatatctgctttgtgtcacatactgtgtgataggtgcagtgatataatttcgaagatgccactctcaactcccaatatgacatgttaacagtctggtaggtgactgtaacactgaaatagtttccacatggagcgtcgagtgccttaggtatgtatgagggacaatggagattttcagggaggagtaatcagtgctggctggggaagtgggtctgcaaagagatgaatgtggggaggtctcccaggtggaggcagcaggatatggaactcattagggcataaatcattatgcacatcatgatagtgggaacacaaggagtgagaagaggagcagtcagaggggaagtttggagtctgaccatggcgggccttgtgtgccagaccagtgagtttaagcttcatgatgagggtgataaggaaatgccttaacagatgaataacttgatgaaagccatcatttagacagcctcctctggcagcattgcagagcatgggctggaaggaattgagagcctatgagtccaggtgataccagggtaggtccccaaatgctggtgggacttcaaccccagccagtgtccaggattttgacaccatcatgagaagaaagtcaaagataagtcagaaaatagtgaaagtatggaaatttattgcaagtgaaaagtacatactcaagaaaggggagtgcaggcatactcaagagagagtcgcacataaaggagtttgggactgctacctttatgggtttctttaaccaaggtatggaatagtcatgaaaattcctggaaaaagatggagatttcttggaactgtggtgccatgccacgcatttttacaccaaatatgcatgttcccaaaactctcctggcactggtgggtgtgtaattgagtatgttaatgagcatataatgaggatctaagtgaaacctaggtcgaatccagcaccatgttgggtccagttggtcttagcccgcttggtccacacaggtgtttcagggtcttaagcccatagcctctagtcatgtgaaactgctatctggagtttttattcccctgtgatgatgctatatcattcctgtctgataaggggagttctgaagcttggatgaaacttcatagttgtcccaaaaagacagggatcaggcctttgtaaaccacatgggttcaagttcaaaaggaaagaaagaaacttcaggtgagcttgagagaccccaattaactgcaaggttcaacacatgaccctgaaagaatcaaagtattttacctcaaaatatatttctttgacatattctgaaatggccccacaaagctgtctcttgtgagggaaatttgcattccatagagagtctccttcccttaataggaattttcccagagagtctaagattttttagggtctgataataaacattcacatttattcgctctgaagcctgctacctggatgtttcatgtacatgacaagaactttggcttccatagccccctaatctaaactcaatcatttctggcgaggcacagtggctcacgcctgtaatcccagcactttgggatgtcaaagtgggtggatcacttgaggccaggagttcgagactggcctggccaacatggtgaaactccatctctactaaaaatacaaaaattagccaggtgtggtggcacatacctataatcccagctacttgggaggctgaggcatgagaactgcttgaacccaggtagtggaggttgcaatgagccaggattgtgccactgcactccagcctgggtgacagagcaagagtccatctcaataaatacataaataaataaacacaagcatttctttatgatgaactcaacttttcaggcaaagcttaactctttcacccatttgccaatcaggaaatctttgaatccatctatgacctggaagcccccattccctccattttgagatgtcccaaaccaacatataccttgcaagtattgatttgtgtcttgcattggaatttctgtctcacttaaaagtataaaaccaagctgtaacccaacaaccttgggcacatgttcttgggacctcctgaggccatgtcacgggccatggtcctcaaacttgacaaaataaacctctaaattgattgagacctgctcagatactttttggtatacacttaaaagaagaaaagttgtggagaaagaggaagggaggagactgtggtcatggatgtgttggagtttaaggttttagaagcagagacattcctcatgatgaaggggctactatgaccatgggagtaggtttcagggagaagaaagttggagttcattgccattgagttaaagcattaagaggctagggtattagttgtgttgcccatgcagatattaaatttacttaagatggtagtagatgctaaggtgggaagaaagactcaaccaggtgttaaagtgcacaatgaatgtagaagtacaatgctcacttttgtagaatattaatgagaaaagtaaaaggaggagtaataaaatggctggaacctaaaaaaataagtgattttgtatgaggaggtaaaaataatgtcctaataaaattattagggagctgagagaatgcaaacaccaccactagtgtccatatgagagaatgagtggcttccattaaaaatagttctaaggaggccaggtgtggtgactcatgcctgtaattctagcactttgggaggccaaggtaagaggattacttgagcccagggatttgagaccagcctgggcaatacagtgaaatcctgtctctacaaaaaatagaaaaattagccaggtatggtggcatgagcctgtagttccagctacttgggaggctgaggtgggagaatcgtttgagcctgggaggcagaggttgcagtgagctgagattgcaccacttcactccagcctgaatgtcagagtgagacccagtctcaaaaaataaaataaaataaaataaaaataaaacagttccaaggaatcgatatccttagggaagagacaggattcaaaaagtcatgggagtagagagaaaattccagaaagataatgtcctcttggaggttatttatagtgaatatggtattttctcttctgtttcattgactgtttttctattatcgtatcattaatatgctgtttaaattatcatagctttataataaaattaaatttctggtctttcaagtacaattttgttgttcttatccttcccctaccctcaatttcttagctattttcacttaataaaattatttcactgttattctgatgagaaattgcattaaacgtgtacttttacttgggtataactgacacctttatcctttgttgtaggtcaacttccctgggaagcctactcagaaggagatttgtataagtagatttattaggaagaatccttgggattaatatgtgggaagaaggagatgggattaggcagaggaagcgttgaactgtaatgaagtcataacaaagcagttgatcccatggagatagagttctagtgctaaaatggaacttcatagttgccccaaactgaggcaaggggaccagacccttgtaaaaacttccttccccccattgaccagtctcactagaggtgaactacccagcaagaagaggccttaagcttaagagaggtggctttcattgagggagattcctggagaacaaacgagctataagccattggcagccaacactctcagcagcaaagggaatgatgccttggtctcgttccaagtggggaatctcagtagcacatcacagcatccactacacccatttaagtctcttcatgagtgtattgcgtctcttgttcattcaaatctgtttttttctgaagattttcaaagattcaaatggttacaaaagcagtctcctgatgggttcctctttcccactgaacagacaaaaccaattcactaagactgtggtattgcagtacagaagaagtgtaattaaagcaaagccagccaagtagaaggacagaaattttattattactcaaatcagcctcccagaggactcagaggctagggtatttatggataatttggtgggcagggggctagggaatgagtgccactaactggctggggatgaaatcatagcggggctgaaaagggtccctgtgcactgattctgcctctggatggaggccttgggaccagctgagtcatgattcacaggtccaggtggggccagttggttaccagaaaccaaaagtctgaaaaacatctcaaaagaccaatcttaggttctacaatactgatgttacctagaagagcactttgggaagtcacaaatcttgtgacctctagccacacgactccttagcagtaagggattatagacactatgcctacattttagcagaattcagctccccagtaatcctaatcttgtggtctttcgttagttttataaaggcagcttcagtccctgagcaaggagggggttagttttagggagagactgttatcattattgccttcaagttaaactgtaaactaaattcctcccatgattagcttggcctataaccaggaatgaccagggacagccagcctgtgcagccagaagcaagatggaatcagtcatcttctcactgccatagtttttgcaaaggtggtttcacaaagacttacataggcttttccagacaatctctatcacactgcttattaaatttattatagattgttttgtatgttgtataggcgtggtgaataagacattttttcctttatatgttctaactggttattcctagtgtgtaaaaacagtatataggttactatgttcatttatttgtttatttacctttttagctttagtgaggtataattgacatacaatcagctgcacatatttaaagcatgtacttggatgaattttgacatatatatatatttataagaatatcaccacaatcaaaataaccaacatattcatcatccccaaaaactttcttatgtctctttgtcatccatctctctctggcaccagcccctgacccaaggtaaccattaattcaccttctggccaattagtttacattttctaggacttttttagtgatggaatcatacagtatgtatgatttttttgtcagtctttttgtctgtcttctcagcataattattttgagattcatccatgttgcttcatgtagcaggagttcattcctttttattgctgtgtagtatcatgtgagtatcatagcatatccacttacctgctgatggacatttgcttgttgtttccagttttaggcaattacaaataaagatgacattaatattcctgtacaagtctttgtgtagacatgtgatttcttttttcttggggaaatacctacaagtggaatgtctaggtcatatgagaggaatgtgtttaatgtttcaaatgttttcaaaacaattgcatcattttacattcctaccagcagtacagagttccagttcttccatatcctctgccaatgttgagtgtggtgaaacttttaaattttagccattctagtgaatactgcattagtatactatattagtccattttcatgctgctgataaagacacactcaagactggaaagaaaaagaggtttaacagagttacagttccacaaggctgtggaggcctcatgatcatggcaaaaggcaaggaggagcaagtcacatcttacatggatggtggcgggcaaagagagagcttgtgcagggcaactcccatttttaaaaccatcagttctcgtgagactcattcactatcacaagaaaagcacaggaaagacctgcccccataattcaatcacctcccatcaggctcctcccatgacatgtgggaattgtgggagttataattcaggatgagatttgggtggggacacagccaaaccatatcattccacccgtggccccacccaaatctcatgtcctcacatttcaaaactaatcatgccttcccgacagtcccccaaagtcttaactcattttagcattaactcaaaagtccacagtccaacccctcatctgagacaaggcaagtcccttccacctataagcctgtgtactagtccattttcatgctgctgataaagacatacccaagactgggaagaaaaagaggtttaattggacttacagttccacatggctggggaggcctcagaatcatggcaggaggcaaaaggcacttcttacatggtggcaacaagagaaaatgaggaagatgcggaagcagaaaccctggataaaaccatcagatctcatgaaacttcttcactaccttgagaacagtatcgggaaaaccgctcccatgattcaaactatctcctaccatgtccctcccacatgtgggaattatggaaatacaattcaagatatttgtgtggggacacagccaagccatatcagcctgtaaaatcaaaagcaagttagttacttcctagatataatgggggtacaggcattaggtaagtacagctgttccaaaggagagaaattggtgaaaacaaagggactacaggccccatgcaagtctgaaatccagtagggcagtcaaatcttgaagctccaaaattatctcctttgactccaggccttgcattcgagtcacacagatgcaagaggcgggttcccatggtcttgggcagctctgcccctgtagctttgcagactacagcatccctcccagctgttttcacaagatggtgttgagtgtctgcagcttttcctgcagctgcagcctttcctggcacacagtgcaagctgtcagtggatctatcattctggggactggaagaccatggccctcttctcatagctccactaggccatgccccattagggactctgtgtgggggctccgaccccacatttccttctgcactgccctagcagaggttctccatgagagccccacccctatagcagacttctgcctggacatccaggtgtttccatacatcctctgaaatctaggcagaggttcccaaacctcaattcttgacttctgtgaacccacagtctcaacatcacgtacaagctgccaaggcttgaggcttgcaacctctgaagctgtggcctaagctgtacctcagccatttttagtaacagctggagtggctgggatgcagggcaccaagtacctagactgcacacagcacgggaaccctgagcctgacccacaaaacaatattttcctcctaggcctctgggcctgtgatgggaggggctgccatgaagacctgtgacactggagacattttccccattgtcttgtcttaacattcagctcctcattacttttgcaaatttatgcagccagcttgaatttctcctcagaaaatgggattttcttttctatcacattgtcgagctgcaaattttccaaacatttatgctctgtttctcttttaaaactgattgctcttagagcacccaagtcatcttttgaatgctttgctgcttagaaatttcttccaccagataccctaaatcatctttctcaaatttaaagttccacaaatctctagggcaggggcaaaattctgccagtctcttggttaaaacataacaagagtcacctttgctccagttctcaacaagttcttcatctccatctgagaccatctcagcctggaccttatcattcatattactgtcagcatttttgtcaaagccattcaacaagtctcttagaagttccaaactttcccacattttcttgtcttcttctgagccctctaaactgttccaacttctgcctgttacccagttccaaagttgcttccacatttttgggtatctttcagcagtgccctactcaattggtaccagtttactgtattagtccgttttcatgctgctgataaagacatactctagactggaaagaaaaagaggtttaatggacttacattccacatgggctggagaggtctcacaatcacggcagaaggcaaggagaaggaagtcacatcttacacggatggtgccaggcaaagagagagcttgagcttgtgcagggaaactcccatttttaaaaccatgagatctcgtaagactcattcactaccatgagaacagtgcagtaaagaccctatcccataattaaatcacctcccactgggttcctcccacaacacatgggaattgtgggagtcacaattcaagatgagatttgcatggtgacacagccaaaccatatcacctaccctacttaaacatgctcagaacactttcagtatccaaaaaattacatgagatagtcaacactttattataaaataggctttgtgttagatgatttggctcagcatcacaagagagtatcattctgtatatcacttgcctgggaaaagaccaaaattcaaaattcaaaaagtgcggtttctactgaatgtgcctcgtttttgcaccatcgtagagtaaaaaaattgtaaattgaaccattgtaagttgaggactgtctgtgtatatgctaggtcaagactggaagtgaactaaaatgaaagtagttgctttaggtgagtgagtttatagctgatttttttctcttcttctttcttttcccttccccttcctatcctgaaacaatttagccctaaagccattaggaggggcagagtaaggtaggtgggacaagggggtgtggggatgggggcaccagagcagaattgagagcccagcaggcaagaagtgcatgcatgtttggcacagggtgcctaaaaggaaagaaaaaacaattcagtttttctctatcctcaacacttctgacaacaaatatatgggttttttccatgccaagcagttctccaattttcagcaaagacaccaactgagtgtccttcaattttgacactaattttctggagttaacatctgctgtggtttattcatccccaccaaatctcacattgaaatttgatcccaaatatggtggtgtttggtatattaggagatgtttggttcgtcctcataaatagatcatagcctttcctgggggtggggagtgggtgagttttcactctgttagttctgtgaaagctggttgttaaagagagcctggcaccttctgcctctctcctgcttcctctctcaccatgtgatctctgcacacgccggctccccttcaacttctctgtgagtggaagcagccgaaggccctcaccagatgtagatgcctaacctccagaaaagactgaggcaagtatcaatcaatttagaggtttattttaccaaagttgaggatgtacctgggttgtaggggaagggggcagtgaccacaagtcacaggagcacctgtgacctgtgacttttctgagagagttttgaggacttcaatatttaaaagggaaagagcaaccaagaggtgaaggaggaaagaaataaaggagggaaggtaggcaatgaggcaggtacattctggggaggctttgattagtgctcactgaatctacattttacatgtgaaaagtggaggtagaggagcagtcaattatgcattcatctcatgctcagtaaatctacattttacataagataaacagagtagaggaacagtcaattatgcattcatctcatgctcagtaaatctacattttacataagataaacataaagtagaggaagcagtcaattatgcatttgtcgtggggtgggtggagggatggctccggtcttgtccttgtccgatacctgtgaatataagctattaatttgtattgtcaggatgaaattcaacagacctctgttttaggattagttaactgaaagatttgagggcccacaaggaatttccttgaaagcaatttgtgaaagcactacctggggagatacatggcctttgatcactgcagctagatagatggtttaggaacaaacagaaaggcagtttttgttgttgttgttgttgttgttgtttgttttttgcataactcagtttccaagcttaactgtccctttggcatagtgagttggggttccaacatcgtgtttttcattcacaatggcaacacaaaatagactaagacagcatcaaaccctgcaagttaaagggctcagtcccacaagactgctcccacttcagatgctagtcacaggtcccaggttaacacctgcacttctggctgagttggctgcataatgggagttcccatgaccccctcctctggtttgataatttgctataaaagcacacagaattcaaggaaatgttttggtaactattaccagtttattctaaaggttatggttcagcaacagccaaataattatctaaggcaatgtccttgtttgtaggaaatgtccacttaaatacagtagtccccctttaccttggtttcactttccatggtttcagttacccatggtcaacagcagtcagaaaatattaaatggaaaattccagaaataaacaatttgtaagttttaaatagcacaccatcataagtagcatgatgaaatcttgcgccatgcagctccatcttcctcaggatgtgaatctcccctttgtccagcaaatccacactataggtgtgccccatctatgagtctcttaggagccaccttggttatcaactgtcacagtaccccattgctcagtttcaggtcacctttgtacttaataatgtccccaaagcacaagagtagtgatgctggcagtttggatatgccaaagagaagccataaaactgcttcctttccatgaaaaagtgaaaatttcttgacttaataaggaaacaaaaaattatatgctgaagttgctaagatctatggtaaaaacatatcttctatccatgaaattgggaagaaggaaaaagaaattcgtgcatagtatacataggatttagtgctttctgtgatttcaggcatccactgggggtcttggaacacctcttctgcagataaagagggaatactgtactgtattagttagcttgggctgctgtaacaaaatatcacagactgggtcacttaaacaacagaaatgtatcttcttaagttatgaagtctagaagtccaagatcaagtttctggcagggttggtttctcctaaggcctttcttcttggcttgcagatggctgtcttctccctgtgtcttctcatcatcttccttccgtatgtgtctatgtcctaatctcctcttcttacaaggataccagcacgttggattagggcccaccctaatggcctcattttaacttaattgcctttttaaagacccaatctacaaatacagtcatactgtgaaatactgagggttagggcttcaacatatgaatttcggagggacatagttgagcccacaggtatcaaaaggctgatgaagcattatgtcagcaattcactctcaaatggttcaggaaaaattaattatttgtactttattttcaacttctctgtaagcttgctttggattaaaacaacgaaaaaaaaatgtgcttaaatgttgttcctgtattctttctataatactctaaggcaaaatgaaggcaagagagtaatcacgttttataaaaatgcaaatggaaaagtgttaattctatctgaaacatgataaagctctgttatttaaaaaatgctcttcagtagcatacttcatgccttggagatgccggatgtatgacatatggagtaatagatatgctttaatgccacataacacaatcacaatggactcatctatttcaggtctctgctggatttccctcacacagttgagctcaggcattttgcaggatcaatgtgtttatttctaaagtggcatcttccatcattttacagctccttcaacaggctaccagctgtgtgagcctcccacataaccatgaagtatattaactagcaacagaaggaagaggataggaaaaggaggtagaagggagagttcaatttcatgtcactggtttttgccaaattataacattataccatatggtgtatgtatgatagtgttggatctggaaaaagcaggtggagttaaaaacagaggaagatgggacaggatggaaatcaaagagtagcacatgcataaagggatcacaggaaaatgaaactcgctggtgaatagcaagattagatgcaaaaccaccaaccccttctcacgccttgtcaatagcctcctttcctatgtccccaaatgcaccaccttcacagtcaaagtccctgatgctcacttacacactgtaatctcacgtgctgcagcaacattccctggtcaaaagtattttccttaaagacctcttgctcaaagtataaaattccactgtaaaagaggtaagtaaatgactgaggaaatcactgtgttggccaggtgtggtggctcatgcctgtaatcctagcacttgaggaggccaaggcaggaggattgcttgaagccaggagttagagaccagcctgggcaacatggcgagaccctgtctctaccaaaaaaattgttttaaattagctgggtttggtggtgcatgcctgcagtcccagctaatcaggggctgaagtggaaggattgcttgagactaggaggtcaaggctgcggtgagccataaatgcactgcactccagcctgggcatctcaatcaatcaatcaatcaatcaatcaataatttaaaatgatgtaaatataataagaaaaagtagggaattaagacttccatggctacaaaaatacaattagatggaagaaataagatctagtgttcagtagcaaaatggggtgactacagttaaaaaaatttattgtatttttcaaaataaccagaaaagtggaattggaatgtttctaacacacacacacacaaagataaatgcttgaggtgatgggttatccctattacccaaatttgctcattacacattgtatgtttacatcaaaatctcacatgcacttccataaatatggacaactattatgtaccataaatatttttttaaaaaatttaaagagacttctgctgccaagtcatcttagtgtgaagaagtttatgagcacaatctctgcaggatagttgcctgaagtcaggtctgagagaagatcaaatcacatttagtaagagccgagactagttccagcatccactctggacaaatgcctctactctcctgggaacagagaagagtgatgcttctcctcttccctgcacccaccaatgatcagggaggctgcatcaggcaacattctgcaagcatcatctgccttttccaggtcttcatttattctcttttatgcttcatcatgacccgtcccactccaattcctaactcaattaagatttcatctgtcctttaagattcaactaaaatgtcactcatgctatgaattcttttcccatcctcccccctgctttcctactttttttttttttttttaaataaaccttttagcatctgatttcagcattcagttgtatacttgtcaattctctcatcagactataaactgctttagggcatgaacaatgtcctactccttatcccatacccagttcctgctgcactgcctggaacatgcaagcatttaataaatatttgttgaattaaatagactcagagttaatgagacttttgattttccagggctttatttacacattcttttcccactacagtataggaaggcattgaaccaaacatccacgggaacaagtctcttcatgcagttaaacaagtttcaaaaacattaattaaaaagcattttcccattaacaggaaagaacagatccaaaggcagtaactccatcctcacatccctagttcattaaaatgcatatgtgtttgtgccacggatttgaacataaacttgaaaatcagttccccttagctttgtgagctctgaattacatttccttccccatttgcttaacatcaatgacacacagaacaatgccgggaaagggctctggatgttatcagcggctgcaggggaaccaacctaggagcctgaactgggggcctggccagaacagaaagtacattttaaaggactgaatctatcactcttatttgttgtttgaaccaggctctgaaaggtatgattctagattacagagatttttttcaaaccaatgcactagaatttacaataatctaatgttctcccctctgaagtccacatgcttattctatgttgctcacaatggtttgacatttctctgtgggtttgcttcctattcgtgtcagacgaaactttcttttaaatctgaaagaggactggcatggtggctcacccctgtaatcccagcactttgtgaggcaaaggcaggcaaatcgcttgagtccaggagttcaagaccagcctgggcaacatggtgaaaccctgtctctacagaaaatacaaaaattagccaggcatggtggcacacgcctgtaatcccagttacttgggaagctgaagcagaaggattgttcgtgccggggatgcagaggttgcagtgagctgagatcatgccactgtactccagcctgcctaacagagtgagaccctgtctggaaaaaaaaaaaaagaaagaaagaaaatctgaaatagcatcttccatttgggttattcacatcctttcaccaaccttcactccaaatgatgtggagctgatttcaaaagtgaaatctactctaaaatgacagagtatgaccactgagaacaggtgagagaatgtacctctgacactgccatctacagcaaatgtcaccttggaagaagcatccagggtgccaagctgatgttgtaaagggggatagtactcatttagatattccaaattctggcattttatttttcagtcaggctcctccccttcacctgtaaaatgatctgcaaactatgatcccatctctgaaagaaaaacaatgctctatagggattcaataagaaggagatgtaaaaaggttttgtccctgaagagcaaagcatcatttgttcatcattcatgtattcactcgactcccatttacaaagccttgactctaagtaagggttgctctgggagctgaagatacacagaagcatgaggctgagttcctgccctctctaagtgttcataggctgggaagaaacacagataatttccacactctttcactgtttcagtgctttcaaggatgcatgcacacaggagcccggaagcagaaaggtggggagctgagcctgaatgggagtctgttgaaggtggtggggagaacagggtggacttttgagagtagagaaaacactatgtaaataacagctctaattgcctttaaggcagatcacactccaacatcctcatctcaggctaaaatctctactccagaatggttacatataggttttccgaagtctaacagagtgaaatctgatgatacatgcaaacagctacataattaataaaatgtaagttatcattctatttcctctgcaacaatgtaagtcaacattctattttctctgcaacaatgtaagacatccttgcaacccccctggaaacaaaaactaaaaactaaaaataaataaagaataaagacatcccaagtttttgccaatgtagaaatgaagatgaacaatgtttgcctctccctgggtcagattatctgctgagttagactctcctctactagcccaggtgctttgcttgtactgtggggcagaaggagggggaggtggagcattgtttctgccttccaatcatacttcctaatggggaactgccaattagcctgattctcagccttggcccacctccttctccttctgaggtagcagcactcactgccccaggtcttagtctagagtcaatcccacaagtaacccaggcccacatctatgagatctcagtcatttcgcagttagcccagcacccgccttgtccttgttcatcagatgcctgcacttgcaaattattctctcaagctaaccaccaactcataacaaacttaacgtataaccacaccaagacacaggcattatattgttcattttacaaatacgaaaattgaggtccagaaaaaaataactatccaagatcccatagtcagaaaaccatggagtcaggatttgaatccaggtctatctcattgcaaaggctctgcttcctcttctacttcttctggcctcccagtaactcactctgtgactcccaaatgagttacttcacctccctgagccctattttcctcatctacaaaagaaaatatccacaccaacatctgttaaattattcattcattgtgtgctcatgtctacaagttcataggtatggaccaaaaaagtgaggacagggagattttacagtcaagtacattcgaagaaactgatttcaacaaaggttagtatatttgtttccttcaagacttcaagacttctcagagcctttaacataatgatacgttttagaaattttgagaagggatatatatatatatatatatatttgagacagggtctcattctctcacccaggctggagtgcagtggcacaatcatagctcactgcagccttgaactcctgggctcaggcgatcctcccacctcagccacctaagtagctgagaccacaggcgtgcaccaccatgcctgcataattttgtggggtttttttgtgtttgcagatacgaggtcttactatgttgcccaggctggtcttgaactcctgagctcaagagatcctcctgtctcagccttccaaagtgctgggattacaggtgtgagccaccacacccagcctggcaaattttttattttattttttgtagagacaaggtcccactatgttgccgaggctggtctcaaactcctgggatcaagcaaccctcctgcctcagcctcccaaagtgctgaccaagaagggctatattcttatttcccttattcaccgtggaataccgttaccgatggaacactggtttgggaaacactgcacgggatgatacataagaggtttccaattcctgcattcactgcccagaccccagaacctctgattcttgccctaatcctacacagatttaaagacctctagggaagctaaatctatgatgtttcctcatggcctccattgaagatgcagaatctgttaagccaattaatagttaatagctaattgattctgtagctagcacaaacaggctgcctctccatttcttcagtggtggacacagtgaaatccaaggcagagctgcttgcacaggcccttttcctacctagacaactgtcgctggcttcatgccactgtttacacatggtcatttctttctctctaagcacttagacttggattcgttttcataaacttaaagctgctatttggggatttgtttttgtaactctaatttgacttagttcacagtggaatactcttcactgcatctttctaaatggagaactgcccatttctttggattcagcccaagtacagtgctatctagatggagggggctgggctgaaactttttaaaagggctcttctaagcccaggattctgtaattcccagtttttcatcctactcttcgtgtttttccagcaccttcagaaacttagaaaatttaaaagagagagctagaaaaagaggaaaatgaaaaggaaaagaaggaaagaaagttctggctttcctacctgcctattgcttgaaacttcctagcccctttattaaaaagtaataagtgaagctgttaaatccagggtacccctagcaacaagatgagaaccactgttttcattgttaggaggctagattctattcaacttgcccttagctttttaaaacataatggataagccacagcaattttatctgtttccccaactataaaatgggataataatctctctaacctttttcttccatcctggaattgtccccaagatgaaatttgatcctgtaaacttgcttcagtgaaaggcactacacaaacaaaagtggtaattatagagttgcttggtaaagcagctttgcattgtaagcatgtgaacccaccccaaatatcatattggattttgctcctttgttgaacaccatgtaatagatgaagttccccctttcccactgagaggatgcagggcttcttggaaaaaaggctgatgtcaggtctggagcaccctctcacaagaagatggcaaggaaattaacaaagactataagagttgtttcaaaaaaatcaagagagggcccagcatggtggctcacacctgtaatcccagcactttgggagtccgagataagcatattgcttgaggtcagtagttcgagactagcctgggcaacatggcaaaaccccatctctactaaaaatacaaaaaaattagctgggcctggtggcacactcctgtaatcccagttactcaggatacttgggaggctgagccacaagaatcacttgaacccagcaggtgcaggttgcaggttgcagtgagccgagatcacaccactgcactccagcttgggtggcacctcaaaaaaacaaacaaacaaacaaacaaaaactaagggaggccaggcacggtggctcatgcctgtaatcccagaatcttgggaggccaaggcaggtggatcccttgactccagaagtttgagaccagcctgggcaacatggcaaaaccccatctctacaaaaaattttaaaattagccaagtgtcatgtcatgtgcctgtagttccagctagtcaggaggctgaggtgggaggatcacttgagcccaggaggttgaagctgcagtaagctgtaattgcgccactgcactccagcctggggtgatggaaccaagagcctgtctcaaaaagtaaaaataaaaaataaataaaaacaaaggataactccaataagctcccattgttcaaaattggaaaaattcaagcttcaaaaagaataataactaaaatggtggaaaatatacacgtttaaatttgccagtttggccgagtgcagtggcttatgcctgtaatcccagcattttgggaggccaaggcgggcagatcacttgaggtcagttcaagactagcctggccatcatagtgaaaccccatctctactaaaaatacaaaaaaaattagctgggcatggtggcctgtgcctgtaatccaggctgctcaggaggctgaagcaagagaatcacttgaacccagaaggtgagatgcagtgcgccagcctgggtgacagagcaagactccgtctaacaaaataaaaataaataaataaataaatctaccagtttataataatactttcaaaacctaatttgtgagtaatatattcattttcatgattgtaacgatggtttcacaggcatatagatttgccaaaactcatcaatttacacacagtttatgtcagtgagacctcaataaagctatattaaataatttaattggttactgttagctaaccaatttattgctgatagtaataagccaactcattattttgaaaattagtaataaaggaagagaactaagcatttttctttccaattcaaaatgtacttcagaacaatcaaatagtaaagtttctctttatagatataattccattaataagaaatgaagtaacctctaataaattaatgactctgagtatagatcatgaacaactgcttacagcacaaaaacaggccatcagacatcatctgcccccagttagaagaaaacaccaccacctataaagttgtcttgccaaagaaaacaaaccccattctgatcaagcctccagatctagctaccaatttacataaaacgcagagatgagaggaatctgttaaattatacatgaggattcgatcagaaaaactcagtgtgagagctccccagaacaaaagacccgactccaccaaataacttgcaagagagagacagaacctataagtttaaagagatgtaaaagacgtatcaaccaagcacaatatgtgagctatatttagatcttgattcagaaacacaaaaattttaaatctatgatatttatagaacaattggaaatttgagaatggattcactacttgccattaggaaattattgtttattgtttatggtgtgatactgctatcatgttttttaaaaaagattccttatattttagacatattgaaatatttatggatgaaaacatatgatatgcaatatttacatcaaaatcatatgggagggtagaagtgggtaaaacaaggtgggcaataagttgataggtggatggcaggtacattgatgttcattatgctgttctccctacttctgtatgtgtttaaaatattccataataaaaactgtctttaagaaataataatccaccctcttggcaagttagccaactctcttatacttctatccagcagagaaattgatccagtagcagcaaacccctggggctgttcatgtctattagtagttagaaaattctttgaggtttaaagatgaaagatatcatataattgtaagggattatttctttattaaactcaataaatgacacagtaaatttggaaatccagatctgatcaccacctaactcaaaatttgggtcatgtgaaggatgagcctcctgagaaatgtccacaaaggaccaatgatcaaagggtgattcaatgacatcctttcctatataagacacccccttagatagagcaaatcggaggcaaaattatagagaaaattaagttcacctcagtgccccactccatcttcattttcaagacacttattctgcctctcctattccctcctctaggctcctgataaaactcatgctagacctgaacaaccaaaattgctcttccactcaagacttcattcattcattcatttattcatccatgctactcaacaaacattaaatgagtgcctactctgtgctggtgatatggtttggatttgtatccccgcccaaatctcatgttgaattgtaatcccctatgctggagaaggcacctggtgggaggtgactggatcatgggcatggtttttccccttgctgttctatgatagtgagtgagttctcacaagatctggttgtttaaaagtgtgtagcacctccccactctcttgcgtcctcctgcttcggccatgtgagatgtgcctgcttccccttcaccttccaccatgattgtaagtttcctgaggcctccccagccatgcttcctgtgcagcctgtggaactgtgagccaattaaacctcttttctttataaattacccagtctcaggtttttctttatagcagtgatagtggtgcaaaaatggactagtatagctgggaatacagatacaaataaagtccatcccagaagagcttgtaggcaatcagggcagcaagacatttaaatgaataattacagcacaaccacatgagctacagatagcatgcggcgggaccagaacagagttgttactaactctttctgggaggatctaggaaagtcttacaaaggcagtgtcatttaatctgtctgcagaaagttgaatgggtatagccagaggaaaaggacactcaaggcaaagaagtagcataaccaaagtcatgagagagcctagacacaacttacttgttgatggagaaggtgagtttgcagggttgggggagccagatcttgaagagccctgtgcactgcacagtgaccttgaacttgatcctgggaacccaggatgttttctaaggagagaaatgcctccttcagagctgtgacactgcagtgaccttgaacttgatcctgggaaccccaggatgctttctaaggagagaaatgcctccttcagagctgtgacactgcagtgaccttgaacttgatcctgggaaccccaggatgctttccaaggagagaaatgcctccttcagagctgtgcccatgtacttgtttgtgggtcatgttaaactacaaactctttgcatggacctgttctgtcttgtaaacccagttcccatcacagatttagaccttttgcaagggtcagacttaaagtctgtaatttcctttttcttttttttaagacacaactataaacaatgctttggaaagaagcccaaggaaggaaaaaaaaataaaagaggactctttcctttaagataagtctagtttggcaacatgagttagtctaacctttattctcactcaaaattctgggatgtcccccttcataagtatcctttgagaaaaactgaaaaaggagttacaggtcaggagtcacatcctggacacagaaattaagattcttgtacaaaggagaggaggaaaatgtaagctccaagtcctccaaaaagagggtaaagagagctcaccttaacagcagaaggatctgcatcctccttatgggatttgatcaggagaggagggtcactggtgctgagcagagagtacttccccaagaagcctccttcccagctcttgggaatttgttctaagctgctaacaaagggggctgtacatctgaaagatcaagactacccctgggagtttgaaaataaccatgcaccctaagggagctgaggggctagactgcccacagctggcaggaaggaagtcccaggtggaggggagcttccgttgcttgggtagaaagactgctgaccctcaggaagtgggttttcagggtccaaagagcagccatgacttgaggtgtattgggccccaagggaaggccagagacatccagccttctatgcgggcctttgggggtctcccttggagacggctatggagcctcctgaggagaagaggccttttctagggttcaggaggtggatgcaaaacttgtgaagtcccagcaaaatcagctggaaattccaccccagggactggatttcctgctctgaatcacagcttcccagtagaagttttcttagatgtctctaaagctaattctcggctggagtttggacatattaatgccagctcagacctgttggactactgatgctttttatccctctgataatacaatcctgtcttgcccactcttcctccaacagagtgttctacccctggatttatcgccactgtccagccttagcatttgaagctgcattaaacagagataacatgatcttgggtacaagccatacatgtgacaacttctgtttctctaaaattacccgcttaggtcctttggcacaacttgatttctatttcctgcctttattattctccttcctattcatagacattttggaaatatgtgtgactgtattactttattagcagttactggccatggataattaatttttttctattgttccatcattgatagccatcatctactaccactacagcttacttaccaattgctggggtagacactaatgtgtgcatgaccaacttgaacatttttattggttgaatctacttctggtacaactactctaaatatcaatcagtgatgtattgacaactgggcatgataatcactcacaagttaaagttgtgatgcacaaagtttgcattttacattgcatctaacagcgtctttaaaattcttttatactctctgatcttcaacaaagctgacaaaaacaagcaatggggaaagaactccctattcaataaatggtgctgggataactctctagccatatgcagaagattgaagctggaccccttctttataccgtatacaaaaattaactcaagatggattaaagattgaaatataaaacccaaaactataaaaaccctgggagataagcgaggcaataccattctggacataggaacacgcaaagatttcatgatgaaaatgccaaaagcaaatgcaacaaaagcaaaaattgacaaacgggatctaattaaactaaagagcaacacattgttggtgggagagtaatttagttcaactattgtggacaatatagtggacaatatattgtggacaatatagtgtgacaattcctcaaagacctaaaaacagaaataccatttgacccagcaatcccattactgggtgtatacccaaaggaatataaatagttctatcataaagacacatacatgcgtacgttcactgcagcacaatagcaaagacatggaatcaatctaaatgcccatcaacagtagattggataaagaaaatgtggtacatatacaccatggatgtattttggcatgtatacaccatggatgcaccactattcagccataaaaaagcaagttcatgtgttttgcaggaacatggatggagctggaggccattatccttagcaaactaatgcaggagcagaaaaccacgtaccgcatgttctcacttataagtgggagctaaatgatgagaacacatggacacatagaggggacaaacagacagttgggcctatgagagggtgaaggattcgaggagggagaggattaagaaaaataatgagtactaggcttaatacctgataatctgtacaataaacccccatgacacaagtttacctatataacaaaccagcacatgtactctgaacttaaaataaaagttaaagaagaaaatgtacaataaattatagttaaccataaaaaagctgactctttctcattaaagtttccatcaagaaaaaattaaaaaatttcaaaataatatctgttgtaaacatattggaatgtcatatttctaagatttttaaaatttgtgataaaacaaactcaaaagttgctttttaatggatgggaattgaacaaatatctcatgtttgcaaggaaatgttttcgttttttctgtgattggtctacattagaaatacataggactcagggatctggaattaagtgtttaggttgcttcagtgcacagcaacctttgaaaagtgtttttgaagggccgggcgcagtggctcacacctgtaatcccagcactttgggaggctgaggtgggtagatcacgaagtagggagttcgagaccaacctggccaacatagtgaaaccccatctctactaaaaatacaaaaattagctgggtgtggtggcacacgcctgtagtcccagctactcaggaggctgaggcaggagagtcacttgaaccaggaggcagaggttgtggtgagccgagattgtgccactgcactccagcctggtgaaagagtgagactccatctcaaacaaaaaaaaaaaagaaagaaaagaaaagtgttcttgaaatagtacttagaggctctggaagaaaagggaacacactactctctgagcacaacacacaaagtgtatgtgggagtgggggtagcccagagagttgagataattatccacaaagaattttgactgagagcgtaatatattatctggctatagatcagtaacagattaccccaaaacttaatggcttagaataccaataaacattgtcacactgtgtaccatttctcatggtttctgtgggtcaaagacacaggagcacatcaggtgggtgtttctggctcacggctcatgaaaatctgtgtgatgttgttacttgagatcacagtcaagttgacaaccagggatgtagtcagtgaaggtttgacaggggctagaggatatgatttcaagtttcatcattggcaaattggtgtttgcacttgctattggtagatctcagttccttgtcacatggccctctccagaggactgcttgagtgtcctcacaacatggcagctggcttccccagaaggagccatccaagaggtagcaaggtggaagtcacaatgtgttattatttcctagcctcagaagtcacacaccattggccaggcatggtggctcatgcctgtaatcccaacactttgtgggggatggatcgcctgaggtcacgagttcaagaccagcctggcaaacctggtgaaaccccgtctctactaaaaatacaaaaattagctgggagtggtggtgtgtgcctgtaatcccagctgcttgggaggctgaggcaggagaattacttgaacccaggaggcggaggttgcagtgagccgagatcacgtcactgcattccagcttcggtgaaagagtgagactctgtttcaaaaaaaaaggaagtcagacaccattatttctgtaatatcctattaattatacaggtcagctctatttggtgtgggagaagactgcacaggtgtttgaatgccaaggggcaagcatcattgagggcctctttcgaagctggttaccacaatagcccagatatatatcagcccctcaatatttccaagtcttctaccttgctagagttttcttgcgcttcataatacaattttttaaatcagctcaaacactcatcctagatatggtactatatatggcctgaatgcttttgttccccccaaattcatatgttgaaacctaactgctaatgtgatggtatcaggagatggggcctttgggaggtgattggatcatgaaggcagagatctgccttgccgcttcatccatgtgaggacacagcaagaagacatcatctatgaattagaaagcaggattccactagacactcaagctgccaattccttgatcatgtacttcccagcttccagaactctgagaaacaaatttctgttttttataagccacccagtctacagtattttgcgattgttgcctgaatggactaagacagaaaattagcactgagaagtgggggtgctgctgtaacaaataccttaaaatgtgaaagtggctctggacctgggtaatgaggagaggctgggagagttttgagttgcatattagaaaaagcctactgtgcaatgaatggacttaaagggtaattctgttgagggcctaaaaagaaaaaaggagaactgtagagaaagccccaaacttctcagagaatattcaagtggttatgatcagaatgttggtagaaatatggacagtaaggaccattctgatgaggtctcaaatggaaatgaacaatatgttcttggacaatggacaaaagcctacctctgttataaagtggcaaagaacttggctgaattgtgttcacatcatagtgttttgtggaaggtagaacttgcaagcaataaaatagtatatttagctgaagaaatttctaagcaacatgttgaaggtttgtcttggtttcttttgaatgactataataaaatgcaagaagagacaaatgatttaaagatgacatttttaatcaaaaggaaagcagaactttaaaatttggaaaattctcagcctatccatattgaaggaaatgagaaagaacaagagtgtggccaagcaaccaataaggagactaatatggatctgccatctcaacagaggccaagtgttatttaacaaggcaatggaataattgaccctgaaggcattggagttcattggggttgacccttttatcagaagcccagagtataagagcttaggatggggcagaacaatttcaaggctctgctccctgcatgcaggcacagtgctgctcagccaccctaggaatggctccagtaagcccagttgcagtacgggctgtggtggttacctctctggagggcacagaaaagtcaccctgggtggcacctgtgtggtgccatctttgccagcagttggcatgcatgagccatgggggaagggctacctccacttagattttaaagaatagagtctcttggatgtatgactcaggtagagggccactatgagggcagggcaatgcccagtggagccatgggagcaaagctgccctcatgactctagactgatagactcacgtgcttgcaattccagtatgggagagccacagacaagcaactccaacccaagtaagctgtggtatgggatgcacctagcaaagccataagggtggggccacctgggacccaactcccatgacagtgtgtttagaaagcaggacatcaagtcaaagaagaaaattattattatttctttttgacagggtctgactttgttgtccaggctggagtacagtggcacaaatactgctcactgcagcctcaatcaccagggcccaagtgatcctctcatctcatccttctgagtagccagcattacaggcatgcaccaccacacccagaattttttttttaattttttgtagaaaagaggtctcactatgttgcccaggctggtcttgagctcctggcctcaagcaatcttcccacctcagccttcaaaagtgctggaattacaggtctgagccaccgcacctggccaagaagattattcttgaggcttaagatttaatgttgtttgccctgttgggttttggacttacttgggaactcttacctttttcttctttcctattttccccttttggaataggaatgtccaccatatgccagtcccaccactgtattttagaaacacataacttgcttgatttcacaggttcacaactatagggcaatttacctcagactgaaccataccttgagtctcaccatatttgattcagatgatatttagatgagtctttggtcttagactttaaagttgaagctggaacaagttaagactttgggagtaattgcggtggaatgaatgcattttgtatgcaaaaaggacatgaattttggggagcctaggatagaatatcatgttctgggtgtttgtgtcccctccaaattcgtatattgaaaactagtcatcaatgtgatggtgttaggagaggaggccttggagcagtgactaggtcattaggacagagccttcattaatgagattagtggccttataaaagaggccccagagagctgccttggcccttccaccaggtgaggacacagaaggggacccaggaagatcagaaaggaggccctgctggcaccttgatcttagacttccagcctccaaaactgtgagaaataaatttctgttgtttataaggtgcccagtttatggtattttgttataacagcctgactgactaaggcatatattgtaaaaccaagtgcccatcccaacatctgcagggattcttggagtgggaatgggaggtgatgaggcggcctgaagtttctcctagtcacttgcggcttacagggcttagaagcaggagctctgctttgcatgttgccttctctgtgctgtcctcttctgcaccatctcatccaactcatcactgcctccaggccatcagtcctcaaggtaccaccaactcacggctgtgtgaaggacacgccagaggaacatgaagtgtggtgggctcagtgttttatgggatgccacaaatagtctaaaattgaacattaatctcttcagttcttttctattgttttgaggcagggtctctctctgtcacccaagctggagtgcaggagtccgatcgtagctcactgcagcctccaactctgagctcaagcgatcttcccacctaaacctcccaagtagctgggactaatctcttcagttcttaatgctgtcttagacattcctactactgaggaactgtcccttgcaaccctctgctatggtctgaatgtttgtcgacctcaaaattcacatattaaaacctaacgcacaaggtgacagtattaggaggtggggcctttgggaagtgactaggtcatgagggtggagccttttgattggattgtgcctttatccctggatatgagagttcccttgtgccttttgccccttccaccatgtcaggacaccacaagaaggcgccaccgatgaggaataagccctcaccagacactgaatatgatggcaccttgattttggactttccaagctccagaactgtgactgataaatttctgctgttcacaagttgcccagtctaaagtgttttgttatggcagcccgaatggactaagcaccgtcttggtcagtctctagtttcaaagccccaatgccccacattggacccaatgacacagagcccagatcaccttaaagaaagggcctattgtccccactgtgagaatggtgagtagacaacctccacctgtcatcctttccatggtctgcctcagttgcagtaccacttcacccaaggtcacacccaaggtcatcacatgaggtggctcacgtcgagtgactgataaaagaggacatatgaaggcccagccatttcagcccaagtggggacaactctaacaggccatttcagccctagatggccccatagggtctcctgaggttgtgaggcctgcaacaaggctcagcttcttttctcctataatcttgatcccaagggccctctttaacagacatcctggtcattaaactctgtcttaggatctaactcctagaaaacccaaactacaggctgggcgtggtggctcacgcctgtaatcctagcacttcgggaagctgaggcaggtggattgcctgagctcaggagttcgagaccagcctgggcaacatggtgaaaccccatctctactaaaatacaaaaaaatcagccaggcgtggtggcatgaggctgtaatcccagctacttgggaggctgagacagaagaattgtttgaacctgggaggtggaggttgcagtgagccaagatcataccattgtaatccagcctgggcgacagagcgagactcagtctcaaaaagaaaaaaaataaaaaacaaaagaaaagccaaactacaacaccccctgctatggtctgaatgttttttgccctcccgaaattcatatgttgaaatcctaacccccaacatgatggtattaagaagtggggactttgggaccaggcacagtggctcacacttgtaatccaggcactttgggaggctgagacaggtggatcacatgaggttgggagctcaagaccagcctggccaacatggtgaaatctcatcgctaataaaaatacaaaaattagtcgggtgtggtggtgtgcacctggagacccagctacttgggagactgaggcacgagaatcacttgaacccaggaggtggaggttccagtgagccgagatcacgactttgggaggtgattgggtcataaaggcggagtcctcatgcttgggatcagtgcttttataagagagattcctcttccccatccactatgtgagagcacaacaagaaggtgctgcctatgaaccaagaggagatctccccagacactgatcttggacttcccagcctccataactgcaagcaataaatttccttgtttataagccacccagtttatggcattttgttatagctgcctgaacagactaagacatcctcttttccctagagtccgtccagagttttctcactcctcaaacccaaaattctgttcatttccttgcagagccaattaacggagtctgactcacacctcgccctggccacacaggccctcagttctaatttttcaggttcaagctggtcccttgggatctttgttaagcagatcattctgtaccctaagaattccaaacttggatgttaaagcagtgatattttggctctcctaacttgaggaggaggaaagtgaaataggagtgtctccatgtgacttccaggcctcccacaccctgtctgaacatcagcctctatttcatctcagttcctggttatacccagtccctgccttctcagccagccagccctctcttctcacctcactccccacacaccttgtttgctccctgtttgcatatgaatcttgacacctgctcctctccctctgcatctgcctctcccagccttcccactccagagctgagctgactcctctgccttcttgtagcctcagtcttgccaagctgcagagcccatcccaactgagaaaaaaagggcaaaaaggactttcatggctgcagctccttagcatgaagaattcttcctattgcatggatgtgtgatgtttcagggtgaagctagccccagctcacagcttttggggctggtttttatcatacctctgagtcctgtagatgaatctttgatcctgatccctgtttccagttctgcctctgccccagccctgttagacagggccaagccttgtttttccagtccctcagccagagtgtgggctcctgctctgcttcccgtagggagaactgatagatcccccttcactgcctgcctgctgaattctcaagcaggggctagttcctgcattccccatagcagcaccctctgagacagcaagctcctctggtagcttgctttggacctttgctcacgtctaattcacattgcatacagctgtccctaggctgatgtcttcagactccttagctaaccctgtacctcaccctccaaagtgggcctccaagaaagaatcacaagtgaaggtggcttcatccccttgcacactattggtgggaatgaaaaccgacgcagccattatgggaagcaatatgaaagtttctcaaaaatttaaaaatagagcaccataagatccagcaatcccaataatgagtatctacccaaaggaaatgaaatcagtatatcaaagagatacacgcactcttatgttggctgcagcactgttcacaatagccaagatgtgaaagctacctaagtgtccatcaatggatggatgggtaaagaaaacgtggtatatatacattatggagaactgttcagctttaaaaaagaaagaaatcctgttatttgtgacaatgtggatgaacctagagggacattgtgctaagtgaaataagccaggctcagaaacacaaatactgcatgatctcactcatatggggagtgtaaaaaaaagtcaaactcacagaagcagagagtagagggatggttaccaggggctggagacagggaaaatggggagacggggagatattggtcaaggggtgcaaagtttcagttatacaggaagaataggttctggagatctagggtactgataatgaatatagttgacaatatggtaatgtatatttgaaatttgctagacaggtagatcttaagtgttctcaagaccaaaaaaaaagaaagaaaatgatagctatgtgtgatggcagatatattaattagcttgattgtggtgattatttcacaatgtgtgcatatatcaaatcatcacattgtataccttaaatatacgtaatttttaatttgtcaattatacttcaatagtgctaggagagaagaggaaggaaactctttcctcttcctaaactgccttccttcattttattcaaaacccacctatttttcctcgactgttcccacccacaaaaatttctacttctctcaattcctctcatgcttaaaaacacaaccacagtttagggtttagtacataattatatccttcttatatttactcactgccttgtgtgtgtcatgtctcaccaactaatttgtaaactcattaagtgcagaggcggcctctatacaatgctgtgttcatattaggctgactcattcattcattcattcatcaggtatttcaggaactaccatgtccgaggcatcactctagatacagagatacaggagctaaggcagcaaaaataaacaaagtccctgcactcatggtaggaagacagacaatcaaataattacataaatcaatggaaaattaccttactctagggggctgtcatgggaaacaggatgacagttcctcaaaaaagtaaaaatagaattgctatatgatccagcaatcccacttcaaggtagatacccaaaagaattgagaacagggtctcaaagagatatttgcacgcccatgttcacagcagcattattcccaatagctgaaaagtggaagcaatccaagtgtccattgatggaagaatgggtaagcaaagtctggtgtatcacggaatatttagctttaaaaagtaggaaaattctgacccattctacgacatggatggaacttgaggacattatgtttagtaaaataagccactcacaaaaacccaaatactgcaagattccacttacatgaggtccctagaggactcaaattcatagggacaaaaagtggaacgggggttgccagaggctggaggaaaggggaaatgggagttggtgtttaacgggtgcagagtgtcagttctgcagtaagaaaggaggtctggaaatagacgatggtgatggttgcacaacaatgtgaatgtacttacaactgctgaattgtatacctaaaaaaatggttatgattgtaaactctaagttaaatgtattttaccacaatgaaaaataatttcagaataataaacaaaattaaaccagagcaacaaaggtaaggaaaggctgtccagaggaagcaatggctgggttgagttctgaggacggagtgagggctgacgaggttagtgggagctctgcccttccccacccctgagtgtatcagcttacacaaatcactgaactggcaacccaccctgaactgcctggcccaggccagtgcttacaggcagatgttcctcccaagggatggagctcattcggtagccctctgcactggggctaaagaacgatgtatgggagtagaagctttccactactatatcctgtaattgaatgtccttgatacatgaatgacacttcaggtttcatgctattttgttttccaagggctaaaccagcctctctaaaaccctagtattcatcccaagattcatcggaggagattgtcataggcagatttctaggtcctgtccctacaccccattctgatccaataggcttggtgtgaggcccggacatagatattgtaagtaaggtacctcctccaagtgattttaaagccaacctttcagagactacacacttgtgaaattctgaaatggatctttattgattttgtaagctttaaacttctgacttggagcactgttattattgttattaatttgccacttgtttgtaggattgggaactgaacattcatttcggaatggcctcactatctgaagaaaataaacagtacaggtaaagacacatattcgcatgatgcctatatctcaaactactttacagacaaaattaccctctacaactttctgggaaacaaagaagcatacagctgcctatcagtatccatgtgcgacaccattccaggaacccctgcagataccaaaatttgaggatgctcaagtgcctgatatcaagtggcatagtatttgcatataatctacacacatcctcctctatactttaagtcatccctagattattcataatacataatacaacacaaatgccatgtatatagttgttgtgctgtattgtttagggaataataataaaaaagtctgtacatgttcagtacagacacaattttttttccaaacagtttcgatctgtggttggttaagtccagaaatgccaaacccacagagggctgactctaatgccccattctataaatagatgagtgaacgcaggcacaggcagtaatacaacttatataaaagacaggattgtggctgggtgtggtggctcacgcctgtaatcccagcactttgggaggctgaggcgggcggatcacttgaagccaggagttcaagaccagcctggccatcatggtgaaaccccatctctactaaaaatacaaaaattaaccaagcatggtggtgcacatttgtaatcccagttatttgggaggctgaggcagagaatcacttcaactcaggaggcagagatttgcagtgagctgagagtgcagtgcaccactgtactccagcctaggtgacagagtgagactcggtctcaaaaaaataaaaaaattaaaaattaataaataaataaaacccaggactgtgacatgatctggctctcaacctgcctttctatgtatcagagttggttcagcccaccagctctgcggggccttgattctctaggggcaaggctgtcaaagccacttggttcaagcatgcacaggatctgtttactagcttattagcccaagctattaaaatgtgttcctggaaatcattattaagtgaaagtgggcatattttgcactccatcaccctgaaatcattatattccataccaccctgcaatgatgatcacagctgacccatgaccctgcacagttctaagggggaaatcttgctcagtcagcgaaggaaaattattcactattctgtgtggttacaccatgagctaaacttgacagaatcatatctctttgaaaactggtaacaggtatatagtaatgatgtattattaaatagcatgtttgttttataaacccaagcatgccaatcatggcaagcagtggtccagttgcccctctctgctactgtatgacactgttcatttcactagggctctggatgggactggatatggatgtaatgagcatctgtgcagactttggaacaaagagcattctgttactaagcaggggctatggctttgtttttgtttgtttgtttgtttttggggtttttttctagatcttttacctttgcagaaaacccattgtccagatgtttaatttctatgatttttaacactttctaaaacattcactggcttgaccactcaatccttaccatctcattcactggtgtcttatctccctcgtgggtcaataagcaacctaggaagagccaggattaaattctaagcctcctgactctttccaccataatgttccacgtgtaaaaatcaccccacgcccgaggaacttgccactttttaataattttatgatacaagataggacgatggtctgcaaaacatgtccaatcattcttgaagtctgattaactggtgtttgaatcccagttctgtcagctgggctgcttccatccacaagtaacagaaacaataaatcaaatccttaaaaataacgagtatgtttgcctgttctcaggacaagaaatccagaggtacgttggctctaggtagctcattagtgcggtgcctcaatgatatcatcaatggtccaagttctttccatctttctatccaaccccaggcatgcatccagactcaacatccaacagaagaaaagactagtaacatcttgagcctagttttctttatctgcaaaatcgttttaacatgtgtgtgtacttgacgcagctgttgtaagaattcagcaagcccgaagcagagcacatggcctggagcagatgctcagtatgtgaggattgaacgagatccgacacagccttgcagaggatgttatctgagtaagtgtctgggccctggaattctcccacttggatttgaaacctgacaccaggccagcggtggctcaagccagtaatcccagcactttgagaggccgaggcgggtggatcacttgaggtcaggagttcgagaccagcctggccaacatgatgaaaccctgtctctactgaaaaacacaaaaattagctgggcatggtgccgggcacctgtaatcccagccactcaggaggctgaggaaggagaatcgcttgaatccaggaggcgaaggttgcagtgagccgagatggcaccactgcacttcatcccgggtgacagagcgagactccagctaaaaaaaataaaaataaaaatctgatacagccacttaccagctgagtgagttggatagatacatttacaatatttctaggcctttttcttcatctatagcatgaagataataacagcacctaacttaaagggtttggaggaagttaaacacaatgatgcctgcaaaatgatccctgacactgagcctgctacctggggactgctcagtaaagtggagcaatcattttgattatgacgataagcaggagagcaaagggggccatagcttggtgatgtaagttgaatttactgggtcctaaagatgcacttggagagggagtctcactcgcctaccaaagtgaaagtctctaaaccaggcacccgggttcatgcacctagcttaccaacagcctggctcacccagcaactcgggaggctgacatggggggatggtttgagcccaggagctcaaggccagcctgagcaacatagcaagaccccaacaacaacaacaactctggtggtgggataaggcaggtaaagtgagaccagggctttagttaaagccttcagttacccaggggaaggtgaagcctgagttgtggtgatgaatccgggaggcctctgctgggatcttgtcagggcgctagagctgcctttgctccaaggcgaggcgccggcggcagggcagggccgggcccctggagcaccgtatgtagcagtgtgcgagcggcgacgacagcgggagccgggcgtggcgcccccgcgtccagaccagaccctggagcagttccacgccaaacgatccgggcacctggggaagcgggtcccgcggccaactgggaagcctcccctcctcccgctgctctacccgccgtgcaggaagcaaagcacggatttctacaggctgctttcccttgaaaaggctgcgcgcaaagcctccgctgagtcccccgacttcgtgacctgaatggtaatctcgcttagaatgaattctagtatttgctattactctaactgattccatggtcagcctcgcattccaccagtgagacgcttatgggaagggtcaaatggctttagggactcacaggctgacttggttattcacagagaagtaaatgttttgcttacccagaagatgacgattctaggcttgggtggtgctgtgatcccactccaggagggcgctccaccgattctctcctctggcacctccaaaaagtagttatttcagaggcaaagggtgcgggctgcctggaacacacattaacaaatcgtttgaagaaggcattagtgctaaagatgtcggtgccacaaaaccaggccggtggctagttttataagggcacaagggagtcaaaagtcccaggttcaaatcctgggtctccactttggctagagtaaattccccagctcattggacgtgcaatcattttgtctacaaaatgccattccacaccctacgccaagggtgtaataaaaaaatgaccagccattaaggagctgaggcaaaagaaacaacaaatcatcaagactgatacgtcgtctttatttaaacttttgagggggctggatgatgatacattacttaataggtacaatgtacgttatttgggtgttgcgtatcctaaaagccttgacttgaccactacacaatctatgcgtgtaacaaaattgcacttctaccccataactttgtacaaataaaaatgaaataaaatgttggtcattttctcatcattaactttttgcatttatttattaccttaaatatgggattgaatattattcatcttgattactgagtaagagtgttttgggggaggcacccccttaaattttgcacaagataaaataatgtatgcaaacatgccaggaactctatagactttccataacgtttgccaaaggaatgcatagagaattgggggctgaagttcggggctgggagccacatgaacacatcctctaggctgttcgcgtattggaccctttgacacaagctcatttcataccctgacggctttgagttaagtgttcacttctccatcttttttccaaggctgcataattaaatgtagaaagatgatgttccctggttctccgcaggctgcagtttgcaggcacagtagcaaggatgcttctgctatgagtcatttgaattctttctcctgctgcccctttcccacacacctgcatgtgggacagcaggcagacttgatgcaccagctgtgggcagtgggcagagcggcacaacatgttttcctgggtgagcaccttggggcagctggggaatccctgagagtcctggccttgggggcaccaaggttggaggggttcacagaagctcattgcagacccatgctggcaccttagtaatccagatactttttttttttttttttttttttgagacagggtctcagtctgtcgcccaggctggagtgcagtagtgcaatctcagctcactgcaacctctacctcccaagttcaagtgattctcctgcctcagactcctgagtagctgggactacaggcatgcgccaccacacccagctaatttttttgtattttttgtagagacggggtttctccacgttggtcaggctggtcttgaactcctgacctcaagtgatctgcccgccttggcctctcaaactgctgagattacaggcatgagccaccacgcccagccctgtgatttagatacttttgaagcttggtcaccatctttcagggtagggagagaaagtggaatgacagaggagaggaaaaactgattagcagtgtaaaatagacactgaaattctttactgttggtttcctttttggaaaatgaaatgctgttcggaaggtttcatttttaaaaaaaatgactctaatcttatgtttaacctagaaaaaagtatttagagcttagcagtttaaaaaaataactccttgatatgtaacgttttataaatgagctgtctgttgaacagaattggtcttggagtacgatgacataaagtagaatggatggcgtgtttgcttgtttctgagagcttaattgaattcgactactgagttggtaaggacctacttaaaacagctcccacttcaactcctcaactcatctcttccttctattcttgtccctttattctctactcttcccctctaggaaaaaggaacaaatcaatcactgagtccttgctatgtgccaagtcctctgttagggtttcccatgtgttacctaattctgtgctcaaagggtgctgtgaagtagacaatctcatggtcatttgaaggatgaaggcacagcccacttcacccagaatctaatggctgcaccgggcttagccaggccttctggtctttctccagcccagcccctcaccccaaccaccatttcaaatgctggcttcaattctgccatagtcaataattagattagtagataataggcatcctacaaaatgttgtgacacccaaatacttcttatgttattaatctccatccattttgtttgaaaggtaagaggtttcatattttgtatgaaaggtaacattaattccctgtgctccaaatgagagaacagaagtgtcttgagatgagcactgtctgtaatcattaactggatgaacacaggtcccaatcctgacaagaaccctgttcctcatccagcagaccccgctgcacagagggctccccctttctttggggctgcttctcctgaacaaaatgaaatgctctgcgtccatggcaagcagagaatatcaaaggaccaagtacacaatattcggtgatcaatttcagggacagcaaccatctctttgcagttcagagggcagatttaacaggagctctgtgcacgtgttgggaaaggcacagagagagggagggagaggtgtgagaagggaacagaacatttgagaaaaagagcatgagcatgtaggtggaagaatgacaccatttcttctttcgttttggcctgggatgaaaaacacagcgtcatcacttctgtttccctcagtgtaagatgtgaagacattaatgacagttcctgcgtagggtgggagaaacacagaagggaaaaacagctatgcgccttctccagaatggaagatgtgagagaccctgcaatttgcctgccttaaacatccatctgtcccttccttctttgtatcagaaccccaatttttagctgagcaagttcctgcctagctgaaacacttcctttcccagccttccttgtataaggtgtggacatatgttcaatttctcaccaaagagatgtcagcaggaagatatgggacttagaaaagtctatttaaaagggaagggaagctcatctcatctccccattcctctatttgctgtcttgaacacagatgtgatggctggagcactagcagtcaccatgggccatgaggccatcctagaggtaaagttgggaggactctctaatggctttgtgaaactgtcacaccaaccctagaatgcctaactttaatcttttacatgacaaatagaattttctcttacctaggaaacatagggggttgaggggagaaatgtttccactacatgcagatgaatgtaatgctaaatgatagggaatttctttctttctttctttagagacagtgtcgctcgttgcccaggctggaatgcagtggtgcaatctcagctcactgcaacctccacctcccaggttcaagcattctcctgcctcagccttccaagtagctgggactacaggtgtgtgccaccatgcccagctaatttttgtatttttagtagagacagggtttcacccatgttggccaggctggtctcaaactcctagcctcaagtgatccacccgccttggcctcccaaagcgctgggattacaggtgtgagccaccatgcccagctgctaaccgatagagaatttatgctgaaacaacacaatcccatttggctaggaaactttcttttcccaatgcatagaaagatatcatgggcagaagaagaaaaggtgtgtaatgagtctcacctttctcgcattattaaaatgtcccatccatttcagaggccagaataactgcattgatgccagagtaactgtattgactgactaaatatttcctatgcattattcatgtgccaggcacaggaaggactctgcccagagaagtccctcccctcttgtttcacaataacttaataaactaagtcaaggcatcaacagcttttcagaaggcacccagtgcctccctggcactgcaagagagaactgaattctagagacaaccgattattaattcaagagacaactgatcatagttgtcactgaccctggtgagaggattaagtgatattaatacaccccaagatgtcatgtactttcctcttttaaacttaatgctaacctggcaatcgatatcattgtcctcaatttatgcatgtatgaactggaacacagagagattgacccacttgcacttagaaagccagccagtgaatctctaggatacagtagatatttgctaaatatatgttgaataaatgaataaaaaactgcggtgtttccactgccttgcagagcataaatgtaaaagactaaaacatatgttaaaaaaaaaaaaaaaaaaaaaagctgacacatggaacattcctcttcccaaatatctttggaatgaatgaatgagaatggctgtaggtgttgccctggaaggatgaggatggtttatctgctctggacttcatgcaaacagctttatcaatcaacccactaaccaatcttctagatcctaccacactgctcaggttcttcctgtgatccatgaactgcagcctagccatggtaccagggagaaagaataagacacactcctgccctcaagtgtttgccagcaagaacagaggctccactgtggatactctgggttttagatatgactccactaccaggtatgtgaccttaagtaagtcactcaatcactcagcctcaaatgctttatctgtaagttagggttttatgcaacaaatagaagccagcacagtggcaagtgcctatagccccagctattcaggaggccaaggcaggaggatcgcttgagcccaagagcttgaggctgcagtgagctatgattgtgctgctgcactccagcctctgcaacagagtgcaaccttgtctcttaaaaataacaataaataagaataaataaatagagactacgcattatgctagccatggaggatgcagagagaaaagacataatacttgtccttaaggatctgagtccagtgaggtaatctacagatgaacaagatataatgatgtggttatctggtaacatgctgttctgcccctgaagtctctaatttgggatgcataaaaagtaccccaacctggctcagaggaagaagtgcaagagcttctctccatcctacctgtacccctagcactgccattctgctggatttccagtcctcttttttttttttttttttttttttcagacagagtctcattctgtcacccaggctggagtgcagtggtgcaatctcggctcactgcaacctttgcctcccaggttcaagcgattctcgtgcctcagcctcccaagtagctgggattacaggcgtccaccaccatgcctggctaatttttgtactctttgtagagacagggtttgaccatgttgaccaggctggtctcaaacgcctagcctcaagtgatccacccacctcagcctcccagagtgctggggtgacgggcatgaaccaccgcacccggccaggaacttctgactctcctggcattgcaaggcagtgtcccctccagaggccctaaggctgttgttggctcttagtggtggccccagcatgatcccgcttcctgcccaccctcctcccgccccatctccagcacttcctaggcggtgagtgctcaggaacggaggccagatccctgtcagagccagtgtcccctcccctgctcccattcctgtaaaccctcatgagtcctcccaaagcatagtcagtcctccctccccagaggcctaattttacttcttttttcaaatgataggtttccaaggcctacagcaacagacattaggacaaaatccaagacttcagtaatacaaaatggagaatccagattttaaagacagatggtcttccttcccaacaagggaaagaaaatgattttacttggattggcacagtaccagtcaagacgcgccacggtaggtaacattccagctaaactctgaggatgacgagctatcctcagacaataattgatattttgagcatttccagcactacgtgccaggcaggcactgcactaaacgctttacagctcagctcgttaatccccctcagacaatgccacaatagaatctagaatccactgcattttacagatgaaaaaaatagatacggagagtgatgtgactttccctaggttcagttgatttgaatccagcccattggcctccagggcccacacttctaaacactcttctctgagccttttattcctggctttgaggatcacaccagatgttctttccttggcttacaatgccccttagtctaagcagctcctactgactcctgggttttcacttgtattagtctgctggggctgccaatgcaaaatgccacagactacaggccttaaacaccagaaatgtattttctcataattctggagtctggaagtccaagatccaggtgtcagcagagttggtttctcctgagcctctctccttggcttgttgacagctgttttcccctgtgtcctcacatggtcatccttctgtgcgtgtgccttcctggtggctctcttgtgtggccaaatttcttgttcttctaaggacagcagtcagattccattagggcccacctaatggcctccttttacctttgtcacctttgtaaagcctcatcttcaagtacagtcacattccgagatactggggattaggatttcaacacatattttgggagggaggacataattctgcccaaaacacaggttaaatctcatttctcaagataaacatgatctcctggatgaggttaggtttgtttttttttttcttagagtcaatgtctctctctgttgcccaggcttgagtacagtgatgagatcatagctcactgcagcctcgaactcctgggctcaaactattctcctacctcagcctcccaagtagccgacattaccggtgtgcaccaccacacccagctaatttttaaattttttttacaggtggggtctcactatgttgcccaggctggctgcaaagtcctgagctcaaatgatcctcctgccctggcatcccaaagtgctgggattactggcacgagccatcacacccagctggttcctcctattaaatgcttccatagtgccccatacatgttcctctagcatttagaactactataattagtatttaaatgactatttgtttgatatcatctcacctgaaagacgtaactgccatgaggggagtgatcatggctgtcttgtcctcttaatgtcccctgtttcccagcacagtgcttgacatctgatgggcactgtcttagctcagactgctatagcaaaaatgccatagacggggtggttttaacaaaaaacgtttatctctcacggttctggaggctgggaagtccaaaatctagatgcaggcagattcagcatctactgagggcctgcttcttggttttcagaatgctggtttcttgctggtgtgctcgtggtagagagcagagagaaagaaagcaagctctcatatgtctctcttcctccttctcctcctctcatatgtcccttgtcctcctcctcttcctcctcctccccctcctccccctcctccccctcctcctccttcttcttcctcctcctcctctcatatgtccctcgtcctcctcctcctcctcttcctcctcctccccctcctcctccccctcctcctcctccttctttttcttcttcttcccttcttcttcttcttcctcctcttcctcctcctcctccttttcctcttactcttcttcttcttcttctttttagagacagggtctcaccctgtcacccagactggagtgcagtgcaatgatcatagctgactacagcctcaaactcctgggctccagagatcctcccaactcagcctctcaagttgcagggactatagtcatgcaccaccactctgggctaatttttttaatttcttatagagacagaaacctcactatgtttcccaggctggtcatgaacttctgggtttaatcaatcctcttgcctcagtccccgaaagtgctgggattataggcgcaagccactgcacccagccttgtgactctccttttttattaatgtttaggtttgggggttcatgtgaaggtttgttacataggttaactcatgtcatggggtttgttgtacagattatttcgccacccagttattaagcctagtatcctgtagttatcttttctgttcttctccctcctccctccaccctcgagtagacctcagtgtctgttgtttctttctttgtgttcataagttctcatcgtttagctccaagtgtctcttcctctatgggtgctaatatcatgagggctccaccctgatgacataatcaccccaaagtccccccttctaataccatcacatggaggattcaacataggaatttgggaggggcactgtcagcctagaccagttatgcaatttttaaatagagtgtggaataaggtaaaaaaatttttttcagttgcaaagcatcacggaaccactagttattattaggattttttttctttttctttctttctttctttttttgagaccaaggcttgctctgtcacccgggctggagtgcagtggcaccatcttggctcactgcaacctccacctcccaattcaagcaattctcctgcctcagcctcctgagcagctgggactacaggcgcgcaccaccacacctggctaatttttgtacccagctaattttagtagagatggagtttcaccatgttggccaggctggtctcaaactcctgacctcaggtgatccgcctgccttggcctcccaaaatattgagattacaggtgtgagccaccatgtctggccagggtcttttttaaaatgaaagaatattaccactggagtcatcctagggattatttcattttctcacaataatgaggagattgttgccagcaaagaaaccttaagaaaattgacactctgccacacagcactttgtttttcaggttgggtagtaaccagataaaagtataagcttttattttcttttaaagcagtgccagaatcagctcataccagctcatgagagcctatttttaaatcttcagttatttttttaagtcagctgttaaacatagacattactcaaacttaaacactataaatgtataattaaatacatattaagaaacaaaggaaatacttaaagttgattgcttcttaattattttaccacgtttgttatgggctgagtcgtgtccccctcccctaaattcctgtgctgaagccctgacgcccagtacctcagaatgtgactgtatttgcagaggggtctgtaaagagttgatgaaggtaaagtgaggttattagggtgggccctaatccaacaggatagtatcttcataagcagagggaatttggtcacacagagagacccccagaggtccacgtgcacagagggacaagcatgtgaagagacaagaagacagtggccatccgcaagccacggaaagaggcctcaggagaaaccaaccctgctgatgtcttgactgtcaacttccagcctctagagctgtaagaaaataagtttctgttgtttaagcccccagccacacaccggtaccagttcatggcctgttaggaaccaggctgcacagcaggaggtgagcggagggtgggtgagcgtgactgcctgagctccctcctctgcctactgtcagatcagcggtggcattagattctcataggagtgccaactctgttgtgaactgtgcatgcgagggatctaggctgcatgctccttatgagaatctaactaatgcctgatgatctgtcactgtctcccatcacccccagatgggaccatctagttgcaggaaagaaagctcagggctcccactgattctacattatggtgagttgtataattatttcattatatattacaatgtaataagaatagaaataaagtgcacgataaatgtaatgtgattgaatcatcccgaaaccattctccccacctttggtttgtggaaaaattgtcttccattaaaccagtccctgatgccaacaggttggggactgctggtttaagcaacccagtctgtggtcctttattatggcagccctggcagagtaataaaacattttactattacctatacgcttgaggttgtgagtcctactggatgtatcaggtggaaaaactgtgtgatggtgagctgctgggcatctcttcccaaggctgtgctcagtacaggtagcttgaaactcaccgtggtagacacatttacaccgtggaaattgacaaacaccgtaaaccagagctttttctctcagagaacccaacgcgcaacatatatcagcaaaacactacctcgaaagagccaaggagagaagagtgggaaggagggactgatcagggagaaatgtaagaaaaggtttgacttttctttcacccattcactttagctgactctgctagtttcctaccctgtatccatctccccttcctgctgaccagcaacacccagactttgtttaggatagtactgctgtcaactaaaaacacttgccttcccaaactccctgggagctgggtattgagttctctgttgcttgcagcctaagtgtatttctgagtgctttatctacacactaaatgaaatatgaaactgaaaaccactgtctctgacagtaggtaatatgtaagcactaaggacagaaagcattcaaaaagaacaagtaagcaatgctctctaggtgtccacaaattgtcttagccaagtgtccaagtcccagttctccaggactgaaaaaatggaaaatcataaactttcaaatgaatgatgaggtagaagctggaatttgcagtcaggcctagtggcatgtgcctgtaatcccagctacatgagaggttgaggcagaaggatcccttgagcccaggagtcagagcacaacctgtgcaacatagtgagaccccatctgtaaccaaaaaaaaagacaaaaagaaaaaagaaccttggaatttgcagtattaatttaaagaaaataaattccttatgcctcttatacaactgtaaaaccaaggcaacatacatgttaagtcctaaccaagatataaacccaataatattttaaactaacacaatagatcctgttttgctaaactaacacatataaaaatagcctgtagcctgaagtccagctctttaactggcctatattttgacttccgttgggcagagaacctctgtttacacagtttagtaaacacaatggcattaatgatttcaagactttgtttgctagttcaagataacccaaccccattgcttagccaaaactctgccaacaggcactcttcagtgtcagtttaatgtggtgtcatttgatctctgcaaaacagtcttgttcatttgaacatgaagttaacattgcagctttattgaaatctgcactaaataagtatctaatctaattattgctggaattggttacagaaaatttcttcatggtgcaattactactacaccgtaggtaatgaactgctgccaagctggtgtgctcagcgatggattccacgtagaacatctgattgttctgcaaagacaagacagatgccctgacccagggctttttgagggcacatgcccgttctattttaggataagtaatggtttcagccaagctcgtccaacctgcagcccacgggcctcttgcagcctaggacagctttgaatgcagcccaacacaaacttgtaaactttcttaaaactttatgagtttttttgcaatttttttttttagctcatcagccatcattagtgttcgtgtattttatgtgtggcccaagacatttcttctttgaatgtggcccacggaaaccaaaagattggacacccctgatttaagccatgtccgccacagccccatcccactttccctatttgaacaactagaaaactctcatttgtagctgtgacattatttgaggcactatgttgtggatggttgaaattgtggccctagtatcacagtgcctgagttcaaatcttggctccacattttactagctctgtggtctttggcaagttacttaccctccctgtgcctcaattttctcatctgaaataggagtaaaaagagtataatcttcgagagtcactgtcaggattgcacaacataatagaggaatttagaagggtgcctggcacacagaacacgctcagtacaagcctgctgctgccacagctgctgctattgtttgtccattacttggtatgaattcagacacagacacttctgatattgcagctcaagcaccagcaccttccggaagcttttccttacatatttgttcctggacggttggaagtcatcgctctcctctgagtccagttgtgccctgtacagtcttctatcacagaatatgtaaactgtaaacattcttttttttttttttttttttgagatagggtctccctctgccacccacgctggagtgcagtggcatgatctcagatcgctgcaacctctgccttccgggctcaagtgatcctgccacctttgcctccctagtagctgggactagaggcacccacgaccacgcccggctaatttttcatatgttgttgtagaaacaaggtttcaccatgttgcccaggctggtcttgaactactgagctcaagcaatccacccaccttgggctcccaaagtgctgggattataggtataagccactgtacccagcctataaacatcaatgacatttgtagtttcgtctccaccacctggaccacaggttcccactgccagagatgaattctgaccagtctttgtatcccagttcctggaacaatgtctagcacattagctgtcatcagtaaattctgacagaagagagagagagggaagaaaagaggaaggaaggaaggaaggaaggaaggaaggaaggaaggaaggaaggaaggaaggaaggagggaaggagggagggagggaaggagggagggaaggaaggaaggactagagcgtcctccagcctttcccaggagatttatatttcaagggaatctgaaccttataaatcaagcttgcagactagcaggcttcctctatcacgaagggaccatttggggtgaaggtaggaacagtatccgcctgctagagtctgctcccactggctcccaggagctgattatgcacgactcttcccaagcccacattcagagccagggttgggaagtctgaaattgaccagtggttaggagacatttacaccacggaaacatttcccagagccagctgttcagcacttcccagcacaccacgggcaacaaggcttctctgtgactccgaaagcagtgaaattttgcatactgagtggtagaaaactgtggggcacagaggggatctgaaagcagaggccccatctgcccgcggcagaggccagtctgggtgggcgccaggcctctgtgcatatgcgacatcctggccctggtcacgtctcttgggccgcacctttatcatcctcatcgaagtcatcacggaagcatccatggagatgtttatcttgtgattgccgattgtttctaatctattaaaagtcaactaataataaaactcatgatgttaatgacttactagtcataaacccaaacaatggaacaaactatttgcttaatatttttatgagagaatgtgcacgtgaccttgcagcttggtgccagttacatttctatttacatagagactggggacaattagaacgtttatctcacttagtcactggtcactcctgccccctactttcccctccctcttcccaaaagaaatgaaaaaacgttttcattataaactgatatctgttgatgaaagcagctatttttaaaaaatgatgtcatagagcctagaatgctacattgttctgagttcagaaaagactcaatggattccttagttgttgcccttgctggaggttaagtgaatgctgagtaacccccccaccccacacacacatctcgtcccttctactcattttcagaactgttatttgactcctcaggaaacttgtttatatttttcataaataatatatgtttttatatagtgcacacacatataaccatcgttttcattctttaaagacattcaaaattccttatttagtttttgaaacagggtcttgctctgacacccgggctggagtgcagtggtgcccgatcatgcccaatcatgcctcactgcagccttcacctcccagctcaagcaatcctcccacctcagcctcctaagtagctgaaactacaggcttgtgccaccatgccgggctaatttttaaatttttttgtagctatggagactccctatgttgcccaggctggtcttgaaattctggagtcaaatgatcctcctacctcagcctcccaaagcactagaactactaggtccgagccactatgcccagcccagatttccatgtttcgtaaactccaattcagaatattcctgttatgtaagccttttttttttttttttttttttgagacagggtctcactttgtcacccaggctggagtgcaatgacatgatcacagctcactgcagcttcagccttccaggctcaagcaatccttccacctcagccctggtactgcaggtgtgcaccaccacgcccagctaatttttgtattttttgtagagatggtgttttaccacgttgcccagcctggtctcaaactcctgagttcaagcaatccacctggctcagcctcccaaagtgctgagattacaggaatgagccgccgtgcccagctatgtaagcattaatctgtacacttcagaaatgtttacttattctacaaaccctgaataaatcccaaacactattttctataggataccctcagatgtagagaatgtgatttgtttgtttgtttgtttgttttgttttgagacagggtgttgctctgtcacccagactggagcgcagtgatacaatcatggctcatggcagcctcaatctcccagactcaagcaattctcccacctcagcctcccaagtagctgggactacaggtgcatgtcaccacacccagctaaggttttatttttaacaaaaagaaataaaaaagaataacctccccaacaacaacaaaaaaagacatcaatcatgtagcaacaaatatttactatctccctgtactggattagaaagttacctttataagccttttatctaactatatcctttcaaacaatatgaggaataaatcagccttctgcaagaataatattttataagagaaaaatctcttatattttgaatgcctgtgaccccccagatcccatgtttaacatgcagggatgctgtgtttgtgtgactccagtaatgtgtgcattataggcatgaactgctgagaaattgaattagtgcttgtgacagggactggagggatatcccagaaaactcacaagcagtcagttagccttgcctgaatcctcttcagtgtgcctcaggtttaatttcacacacacacacacacacacccctccactccctttcttccaaaacatttgccataccttgcagcatccccactccacagtcactgtactttcctatatttgcattttcagcctcctgcttgagtggattcccagctcatggctttaggttaaacctcgctgtctcctgagtctttcaagtgtggccactcatcctgccacaccacaaagccctggaatctggagagggactggagccccttcatgagcttgtgttgcttgcaaattaatagaggcaggaggcaaagaaatcctaggaagataggggtgggtccccagtgaaaccccaccttcaagccaaaaacagcctaaaacccgcagaccagagtgagaacttctattcttgtttgcctgctctctcctgattggttctttctgaataatgcctttcaaccaatcaaatgttgccttttccaatactacctatgacccaccccacccccatcctgtgcctatacagatctcagactcagtcggtagaggggagacagggagacagcctgacttcagggaagagaactcccgacttcgggggaagatgacctgcccttcccattccctctccagctcccctctctactgacagctgttccattgctcaataaatttctccgccctcaccatcctttaatcatcaagcgtcacctcattcttcttgggtgctggaaaagagctcaggacccaccgagtgtgggtacccagaaagactgtcacactggccctttgccctcactggcagagggcagctccctcacacaatggggccagggactgaccgagctgctaaaacaccactgtccatctggctatggatggcagaactaagagagctaattagcatattaacaccccctctggggctttcaggtggtgggtacccctgcctgggcactgccacgttcctcttgaggtaacactcctggtctggccatgggccctgcatggagcttgctcctgtggtgggctggatcccacactcgctcactcacgtattcccacttgcaaggggctgagcacagcaggctgagtagatggggcgtccctgctgggagtctggcaaaggggcagagaaaaatcctgcatcaaaatcattactccttcacttttatgtgaaggctcctactcatgccatctgaccctacccagtgacgccatccacctgcatgcctgtcactcctcctcatcgaagacctcatccatggctcctggtctctctttgagctgagttctgctttggtttgggtaactttactctaattccgacaagctgcccaatatctcaacttcctgaattttgcagctccagcatcctctcttccaagccacttctgacattcattgttgtatgtccacatctgttcaacctctgatgtttgggattcaaacattctaccatccatgcttattctctcattttcagtgcctttgtatttgtctatggtggcaatactgattgccccaaaccttagcagcttaaaacaacaatttatgagctcacacagtttctgagagtcaggaatccaggagcagcttagctgagtggttctgtttcaaggcctctcaggacgttgcagccaagatgcttacctatttcctccatggctcacttacacccctagcaaggtagagttggttgttggcaggagacctcagttcctcaccacatgggcctctccagagggattcttgagtgtcttcaagacatggcagctaagtccccccagagcaagtgatccaagagacagcacaatgaagccagagtgtctttataacctggttccttctgattttttctccatgttagaatggaagcaccaagtccagcccatgctcaaggagaggtgaactaggctgcatcttttgaagggagtaccaaagaatttgtgaacataattgaagctatcacaatctagaccccatctggtccatcagttcaactactcttcctttcttagtcccactacacctgttctctgattcactgagatttttcgatcctcaaaatttcttttttatttatttatctttttttttttttaagatagaatctctctctgtcacccaagctggagtggcgcaatcttagctcactgcaacctcagcctcctgggttcaagtgacctttgtgcctcagtctcccaagtagctgggattacagaaatgtgccaccatgcccggctaatttttgtatttttactagagatggggtttcaccatgttgcccaggctggtctcgaactcctggcctcaagtgatttgcctgtctcggcctcccaaagtgctgggattacaggcatgagccactgcaccctatcaaaatttctaatttctatgggtagctggatgcagtggctcacatctggaaccctagcactttgggaggccaaagcgggtagatcacctgaggtcaggagttcgagaccagcctggccaacatggcaaaaccccatctctactaaaaatacaaatattagccgggtgtggtggtgggcacctgtaatcccagctactcaggaggctaaggcaggagaatcacttgaacctgggaggcagaggttgcagtgagccaagatcatgccacttcattccagcctggacaaaagagtgaaactccatctcaaacataataataataatttctatgggccttttccatttttatttcccttctgcatacagttgagaccccatctggtccatcagttcaactactctcttgccaatatcctcttttttttttttttttttttgagacggagtcttcctctgtcacccaggctggagtacagtggcgtgatctcagctcactgcaagctccacctcccaggttcacgccattctcctgcttcagcctctccagtagctgggaccacaggcgcctgccaccgcgcccagctaattttttatatttttagtagagacggggtttcaccgtggtctcgatctcctgacctcgtgatctgcctgcctcagcctcccaaagtgctgggattacaggcgtgagccaccgcgcccggcctatcctcactcttttattcactcttttatcatccttgtatagcctccattgttgggggtgggctttggttccatccaactgtccacccagcctccatcacccagacagggagcactgatggagccgatcacacccagggtctgctgaacagtgcccacagcttccggtgttcagtgggccttcaacacagcacagcctccttctatttccaaatcagcagtctccgctatggtcgttttgagcattgcccattttccctcagtctccttcaacactgtgaccacattcccccttggttccttacctctcagacctcggacagcgcccctcatcctcctaagcttgcatctaaaaccttcgcaagggtcctactcctcactcgtcctcttcggtcacagatgaagcaacaaagaggtgctgtggcaggccagctgtcactaacacaggcctccgtaacaactgtttcagcactgactgagtggttaagttaaatattaaaagctgagagagccagcgcccttatccaaaggctgggatgtaacaaaatccacccagagctttgcctaggcctttcctgggccttggagcatgataagataatgaaggaactccgaacaggacccgtttaggatttaaaacattttattgggggtctgaagaaactctccaggcctccacaaacaagtttatttgggttctgaaagaactaccctaacctccataatttagcaggagacaagataagggtaatcaccccagcacctggacccatttagattaagtaaatttactgaggctccagaggaaggtcttcaggacttagttatagacgaaaagaagttaatcacttatgtctttagatggacgcacacttaaacacgtaggcatatagcttagaagggatctaagctctggaaaactttgtcattttgagttggtctggcgataatttccaggccttctccctgtgaccggctacagaaataaactctcttctctcccagttcatctgtatctcattattgggccgtgagaataagcagcctgaccctcggtttggtctgggaacagtgcatgatgaagacccaagtctcctcgtggcagacacttgaggaagatgtgttaacaaaagaaaaagcaatgaacctgaactccaggtcctatcacttcccaactccccctgcccaccacctcaaagacctcattgcatctctggtcctctctctgccctgcatcttccctccttacactcgctctttcccaccagcatttagacatgctcaggcctcgtctaccttaaagaaaaagcttctcctttggtccacatcctccttaggttcacatgctgttgtttctctttatacatgatatttttgagagagtgacagagagggctacattcactctctctgttccttacctaattttctttctggaacccattcagcactccactaaaatggctcttgccaaggtcactgccatggtgccaaagccgtcttcttgcctcctcatcttcaaggtccttgcagcattgacacaggaggccacaccacctgcaaagtttcctccccagcagtttccctgtcttcacattttccaaccactgctcctggcaggctccttcccccggcctgtgaatgctggggtttccctgggttttgtctgttcccctccttcttttttttttttttttttttttttgacatggagtttcgctcttgttgcccaggctggagtgcaattggcgccatctcggctcaccgcaacctctgcctcccgggttcaagcgattctcctgtctcagcctcccgagtagctcggattacaggcatgtacagccacaccagctaattttgtatttttagtagagacggggtttctccatccctacagtcggtcaggctggtctcgaactcccgacctcaggtgatctgcctacctcggcctcccaaagtgctgggattacaggcattatccaccacgcccggcccagttcccttccttcttagcttgcacagttcattcattcccatggcttattgataaatcacaagtctatattcctagtttgtatttctttcttactacccactagacatgttgtcctggagatcccatagcccctgaatactcaataaagaggcaatatagtaagtgattaaaagtgagggttctcgggaggcagagcttgcagtgagccaagatcacgccactgcactccagcctgggcgacagagccagactctgtctcaaaaataaaataaaaaataaaaaaataaaaaaagtaagggttctaggccaaatggtttggttcaagttcaagtctttttttttttttttttttttttttgaaacagagtcttactctgttgcccaggctggtctgcagtggccccattctggctccctgcaacctctgccctctgggttcaagcaattctcctgcctcagcctcccgagtagctgggattgcaggcgcccactaccatgcccagctaatttttgtatttttagtagagatggggtttctccatgttggccaggctagtcttgaactcctgacctcaagtaattcacctgccttggcctcccaaagtgctgggattataggcgtgagccaccatgcctggcccctggttcatctcttggcttattattagtgatggagctgagataaattacttgatttctgtgaacctccacctccttatctgtaaaatgagggataataagagatcccaactcattagttaactgggtaaataagtcaattaatgtaaagttattggcatggcctcttactggcctgtgatactagggctcagtaaatgtgagttattattgtcagaatgaaaggagacaatgagtgaacagcacgtggcccatagtgagtgtggagaaaatattgtttggtatcattacatcccaacttgagcttatttctctggacttctttgtctcactctgaaaagcctgctcccctccaatgttccctcgctccgcagatggggtctttatgctcccattttcctacacacacacctcccccccgatatccaagcaatcaccaggttctagctgctgggccatattaatcccttgccaatcaatctacttctttccatccctggttccagcctgtaagtgtcttgttagggactgaatgtttgtgttatcacctcaattcacatgttgaaatcctaacccacaatgtgatggtattcgaaggtggggctttcggatggtagttaagtcataggagtggagccctcgataatggcattagtgcccttataaaagagaccccagagagctccggagctctttcagccacctgaggacacagtaagaagacggcggtctctgaaccaggaagtgggccctcaccagataccaaatctgctggagccttgatttggggtttctcagcctccaaaactgtgagaaacaagaagctggagatgattgcaacacctcttccttgcattagggcaaagcttcctcctgatctctctgcctctagtcttgtccctggccaatccattcttcacactgcagcaagagtgactgtccaaaatgcgcatctaatccagtgatttccctgagggcttcgctttgccctcaggctgaagtccaattatctaattggattgcaaagcttgttaaggtatgaactttgctttcctctccagagtcaactcccaaactcatttcactttgtttctagatactgctttctggagcctctgtatccagtgttttcttctagaacctcctcacctcaccacccgggtcctccagctcactgcttggatgtcactggcactaggaagtttatctgattgccaccaaactagatagggtggttgcctcctatttactctcctagaaatgccaccaaactagatagggtggttgcctccaatttactctcctagaaacatgtgactctgctgacagttatcacactgtttataattgcctgtttgttttccacctttagaccataaaagtcaccaaataatggttaaatgcatatatgggcaacaaacaaacagctgctctttatcctaagtggcctgtgacactgttagtgactcttgcaacaacgtgggtggcccttttccaacctctccctaacaacatatgtgcaatgcaccaccaggcatacaggcaggaaatcaggagagctgagtttaagttgtgtctttgccatttactagctatgtgatcttggtaaagccacttacacattttgagtatcagtttcctcatctaaaaagtggggaaaatatggccgggcacagtggctcatgcctgtaatcccagtactttgggagcccaaggcggtggattacttgaggtcaggagttcaagaccagcctggccaacatggtgaaaccctgtgtctactaaaaatacaaatatatatatatatatatcaggtgtggtggtgtgcacctgtaatcccagctactcaggaggctaaggcaggagaatcatttgaacccaggagacaggttgcagtgagctgagatcatgccactgcactccagcctgggtgacaaagcgagactctgtcttaaaaaaaaaaaacaaaaaaacagggagcgggatgcagaataagctccaataatgtctatgtagctttgtaaactgcaaatcaccacgtggtgccaattccaactctttccttttttcggttcttggtttgccctcttttctgcctcagactctctcttgctttccttttcttccccctcctcttgtcctgcaggggcccctaagacttggctgatggcctctctctcatggttatcagagcacccagggacagagggttaccattcattgaggaggagcccagaagagtctagaactggtcagccaggacacagagtctgagctaacactgactcctggagtgttgctttgtcatttattcactagaggcctgcttcccccatccttgagatgctctgtgattttcacgtagaattcccagagcggcgccttgcttctcatcctaaacactcaacatcgttatctttcagagaccccctgcaggaactttcccttctttgagtcaaatttttctgcaacaactaatgtagcatttaaaatgagaaagttagaaatttgaggattcctcttaaggcaaacacaacagctggagagagaagaaacaaagtggttttaaacacttcatgtgtgctaggagtgttacatatatttatttcatttattgacaactgtgcaggtgcatattattttcttctttttatagatggggaaactaagtttgaatatattatttgcctgagaatacatagctggtaaatgatagattcaaatccagtttagactccatagccgaggctttctgtaatagaaaaagtgtttttaattcacttgttgtcaaatttctccttaccagcaattcagaaattactttttcccgttttcattgcatatcctaagcccatgtcaattctaaataatctgcctaggctatagaagtattcaacttaaactgtgggttgactaaaggccataggggactcatgccaagaagctagaaacttgagaatggtataagcaggtcactagctctctgtggtcacagctacttcctataacttcactattcttagaaacaacaatataaggctgagacgcacgctagtggccaggagggagatgatggggttagagaagaaggaagaaggggaaaggctttccagtgtggtccaaagctgagatggtggtcagcaactcattcattgattactgcataacatacaatgcagttaactaaacggggtgtcaaagaccataatgcattagaaattcagaaaaggagggtccagtagaagacaagataactgcaaaagccctcagctggccaagcactatggtattttttggtgggttcctcactcctctccggagtaaagtgcctcgttacgtacctttgcagccactctcaccgagagatggaatctatttccccacctcttaaatctgaacttgtcttgtgacctttttgaccaagagaaggaagcaggtgtggctatgtgccagtgctgagcctacccttcaagagatccactcttgtggagctgtgctgctaccatgtgaattagccagggctagcctgctggatgaggaaaaacacatagcccagttgcccccattaacccagccaatggccagagtactctgcagctgattgaaggtgcataagagagtccaatgaggaacagaagaacaagccgggcatggtagctcatgcctataatccctactgttctgtaatccctacctactctgttcaaaactactgttcaaaggatttggggtacatcattaaacaaaacaaaaaacaaatccccatcatcttaaactttcattccatttggagacacagataaaaaagtaataagtctaacaaataaatgatactggccaggcgtggtggctcacgcctctcatctcagcactttgggaggtcaaggcaggaggatcacctgaggtcaggagttcaagaccaacctggccaacatgacaaaaccccatctctactaaaaatacaaaaattagccagatgtggtggcacacacctgtaatcccaactactcaggaggctgaggctggagaattgcttgaacctgggagacagaggttgcagtgagctgagatcgcgccactacactccagcctgggcaacagagtgagactccatctcaaataaataaataaataaatgataccatatgttagaaagttttaagtgctgtggaataactagaactgagtgagggagtaagaaacgtggaatggactatgaatatcagttttaaatagggtactcaaggtagacactttgggaggccaacgcaggaagattgcttgagcttaggagtttgagactagcctggacaacagagtgagaccgacccaatttcatatatatatatgcgtatatatgtatatatacaagtatatatatatatatatatatgtgtgtgtgtgtgtgtgtgtatatatatataaaatggaagaaccattcactgggcccagcataaatttctgataagccaattgagaaataaataaatggtggtaattttaagcctctaaatcttgatgtggttattacacagcaatagctaatggatataagcactttagagcctcaatatgagcctgtttcctcatctgttaaactgggataagaattttttccccgcagacatttggagtcactaagctaataggacacctgtaataaatgttgcatcagaataagcacaaaaccctacaaaacaaatattactaattcattctgagaatatccctcattttccccacctctcatctaaggaaagcacagccctcctgctttccagccaggcaggtccttggatattctactggggttgtgtgaagcaaattcagtattccccatccctagatctagtcaattcagcagcaggcagattctgcaggattgaacagttcaatgtgcatgcccaagtgagttttaaggatgacaggttgattttggcttcctgaacacaatttaaattgatgagatctcagtgaattctttcttccaatcctggggaggcgggggcggggcgagggagggtgttcagataatgctttaatcacattgtgaataaaaactgtttgctgagctctgatactgagaaggcactggattttcccagctgaagaatcgtgggcttcttcagtaagagccctttcagaaactaaggaaactgtctgttcccactttagttgtcaacaactcctctctaacctctcaaaagcaatcagtcaacaagtatttgtttagatctgagctatctgcaccaccctaggtgcttggtaaaaagtgagacagtagaagccatagtatctcattcgttcattcattcattcattcattcactcaacaaatactcactgagcacctattctattcaaaaatattgttcattctgagcacggtagctcatgcctgtaatcccagcactttgggaggtggagatgggcggatcacctgagctcaggagtttgagaccagcctgggtcacagggtgaaacctgtctttactaaaaacacaaaaacttagccaggcatggtggtacgtgcctgtagtcccagctactcaggaggctgaggcaggagaatcacttgaacctgggaggcagaggttgcagttagctgagatcacgccactgcactccagcctgggtgacagagcgagactccgtctcaaaaaaaggactgttcaaaggatttggggtacatcattaaacaaaacaaaaaacaaatccctgccctcttaaactttcattacatttggagacagataaaaaataataaatataatgaataaataaatgataccatatgttagaaagttttaagcggtgtggaataactagaactgagtgaaggaataaggaatgtggagtgaatgatgaatatcagttttaaatagggtactcaggataggagttttgccaacctcagttgggaaaaccacacagctcacgtggagtcagtggtagcaactggggtggagagagcaactgtgagttcagaagatgaagaaagccaagagaatctgtgaggcatacaatatgtatctttaagacaccgctggtgcactggggccagctcgtacaggctcactagagccaattatgcacaacccttccaaactcggggttcagtgttgtcgtattggtagcttgcaaccaatcatgttagtagcttggtgggaggatttacaccatgaaaaatggcaaaccctccaaatcagagtttcctttttttttttctttttagtaagagttcagtgtttaaacattttgtatcataccactaattggaccccacctccaaccataccctaggaggttgatatggtttggctgtgtccccacctaaatctcaacttgaattgtatctcccagaattcccacgtgttgtgggagggtcccagggggaggtaattgaatcatgggggctggtctttcctgtgctattatcgtgataatgaataagtctcatgagatctgatgggtttatcaggggtttctgcttatgcttcttcctcatttttctcttgccgccaccatttaagtaagaagtgcctttcacctctggccatgattctgagacctcctcaaccatgtggaactgtaaatccaattaaacctctttttcttcccagtcttgggtatgtctttatcagcagcatgaaaatggactaatacagagggctacaaatgtatgtcctttaataaaaagcatagagggcaatcaagtgtcacccaaaaagggagatcaccatggcaaagtttcaggggaaagtttttgggaagagggtctctcaaataagcagccaagctaatctgtataaaggaagagaaacagagcacagaatgggtagaaagggatgattccatgggaaaggcatggaggttgggctgacatggtgtgatagaaaatctccaccaagaaaacacccaactgacactgaattcagcttcttaccaagtgggatgggatgctttccaaaattgaactaaaaattacctcgtctttcacgcccccaccaaagtcattcctagctctctgaaagctttgcaaaccttgatgaacacaatccacatgtatcttcaggaatagaatctgggctcagcatctgtttggagttctctgaatttttctgcatggaaacatgagctggtaaatagacactaaaacgctgaatgtctgggttctttccccatctctggaactgctttgctcagtaacattgggcaagttgtctcagtactgaatttccccacttgaaaatgatcaatttacattcttcgctccttgttaaagatgaacaatatcatctttgggaaatattttaagctcttctaagaaagacataaacaattatatgtgtatgataaatagaataatattattgttattacaaataaaaatacagatatcctccaaaggctgaaaaaggagagcaagctctattaactctttctgttgtcagggaagcctcctcctccagatcataaatttaccaaagcaattcccctccctggctatggtataccagcctccaatcactggttcagagtatcaggctagccagtcataggaatgtgggcgtgaaggcaataccctgctcagatgccatggttgggtgtgccatttatcctccctccaatcctctctccttcacagcactgttctttctctgtggcactccagccctgatgaggccaccaatttgctttgcctcacttgtaccatgcctccagcacaacttggcatgcatgtagctctttaaattattattattattattattattattattattattttagagatggggtcttgctttctcacccaggctagagtgcagtggcacaatcatagctcactgcagcctcaaacacctgggcccaagcaatcctcccacctcagcctcctgagtatctcgtactacagacgcaccataacacctggctaattttttttttaatgttgaatagatgggatctcattatgttgctcaggctggtctcaaaactcctaacctcaagtgatcctccctccttggcctcccaaagtgttgggattacaggtgtgagctaccatgcctggcactaaattcttgatcaccaacatcaaatgggcatcaagaccactcaacaaggtttctgtgctttcctaatgaaacttttattcttctcaacacaaaagctgtctcttaccttctctaaatctccctctaccctcagataataatcttaccttactcctaatttataacgtagaacccaccaaaattggcctcactttcctaccactaaatccatagacctacctgccactatacccatctctttccactcctcttgcaaggaagaaagagtcccttctccttccataacccagttccaagtgagtcttcaattccatctctcatttcttccaagactccagaccactgttgattacctctctctctttagtcttcaatctcttttcttgattatttctgtgaacattctaagatgtgccagtaactactatctttcatatttaactttttatttttaaagtaatgtgtgtgtgcacacatgcacaccgtgtgtgtttgtgtgtgcatggagtgggttggggggaagggaaacaaaaatggaaaaatgttacaagttgttgaatcaaggaagaatatactaaggtttgggtggttcttgtaacttttctctaggtgtgagattatttcaaatgcccctttctcagaggtcttccctaactaccagatataaagtagtgacttagtattgttttctcagcaggtaactgttctttttaggcatagatcttgctatactatggagttctaggcacacagcagctgtctcagccatgttcaacctgtgactcacatgtgaccacacatacctgagagacagtaggagtagacccagggcccggatgagcaagagacatgggagaccctcgccttgggcaccaaatgtacagggccaccaaaaactcagaaatcaagacaagtaatataaaattttatttaataaaatttaataaaaatgtaaaaaagacatgcaatataaaattttaatataacaatttaaaaagacaaaacaggctgggcacagtggctcacgcctgtcatcccagcactttgggaggccgaggcgggcagatcacttgaggtcaggagtttgagaccagcctggccaacatggtaaaaccctatgtctactaaaaataaaaaaattagccaagcttgttggtgcatgcctgtaatcccagctacttgggaggctgaggcaggagaatagtttgaaaacaggaggtggacagtgcagtaagcagagaccatgccactgcactccagcctgggcgacagagcaagactccatctcaaaaaaataaataaataaataaataaaatgacaaaatacaagaaaaaaaaaacacccatggtgatccaaatatcacaattataaataaagatgaaaatctgaacttgtactttcatgaccctctcccaatcaccccaccctaatcctgatgttgtttcctttccaataaaattttatttataaaaccagacagctggtgaatagtccatggtttgccatacacacacacacacacacacacacacacacacacacacactcacactatatatttaatataatatatataatattatatagaatatattatatattatatataatgtagaatatattctatattatatattatatatataatatattctatataatatagaatatagaatatattctatattatatataatatattatatataatatataatatattctatataatatataatatattctatataatatatataatattttatatatataaataatatataatatattatatattacaagattataagattaattttgatgactgaggtttgggggcccccttaaaatttccctccctatagtcttagccctgggtggatccctctatgatgagggtctaaggagcctccaggaaatgagtataggtgcatacatttgttcaaagacagtgggtcactcttggagaggaaggcagttctgagctcacacagtgcctgtcactcactgctgctcagcctagtggattcaagcacccctcctttgtggctgtctgcaccctatttacactttgcaagctgcatattcaaatatttcacttcactgaaaccattaatttataggctgcacacttcttaaaggccaaatcacatcttttctccttagctctagagcctgggctatagtagatacaagggggtacctggtgattcaaaacctgaccttttcatgtgaccgggaggtcaaccaatggacttcattcatgtacttaccttcactaagggccccctggtctgccgagctgtttgttgtttttgttgttgtttggaggaaggtaagaagacaggaaataaacacatctgcaagcgttcaaaggcccttttgagagtcagcaaatgaattgagacctcaattcttctctttttaaagttcaacattattaggaactctctgataaagtagacacttgtagaaaaatcctcagaggaggctgggcgtggtggctcacacctgtaatcccagcactttgggaggtggaggcaggaggattgcttgaggccaggagcaacatagtgagcctgagagatcaacctgggcaacatagcaagaccccacctctaaaaaaataaaaaaattagtcaggggtggtggcacatgcctgtagtctcaactatttgggaggctgaagtgaaggaatcaattgatcctaggagctggaagctgcggtgagttatgatccggccactgtgctacagcctgggcaacagtgagactctgcttctaaaaaaaaaaaaaaaaaaaaaaaacaggaaagaagaatccccagagttgtactaccacaaggagaagagttctgaactgtgggctaaacctgtgttcttggggacttgctgcctcctaagagcatgtctaatgtcctgaaacacctccagatccaagcttctcagcattagggtcttgctttggaataatgcctgagtgtctaagtgtgaattaaaagagctctaaattagagtccaaagttaaggcaccagtgccattggtgagagatctggacaagcagcgcatcctcagcatcatggatgagcacccacgggagtgagagggaccagctttcatcagcactagtgagtctgtgaagcagtgccagtggtacactgactcggctactgttctctctgcctggcagactagtctagcatttggggctgagcaggtgtctgatgctctaagacaaatcagagatgcctcaagagggagatgtacttcctgctaagttgggcacgtgggatcttcaatgattcattggaaaaatggagagacgtgatcacatttgcacatccagactgctgatacagattatgctagctttagtagatattcgataaaagtttgatgcacaaatgcttgttgtaatttcttctgccccattcattgtctaggtctactttttaccccagaggatactagcaaattagaggagaaagggctacataatgagaagggagaagaaggtagcttagaactatgattatatccactggctatgagcttcctttagattaaaaatgttcttattgatttcagcagggatacatttacatacaattgttcctcaaatcagcaagtatttattgtgtacttgtacaaagtgaaactttgctccaaaaaccttgcctattatagtatttagaattcactgtcagtcatgcttcattactatgcaggatgaatcatagaccagcctctctgtggtatcaagaaaagaggttacagtaaaatagagcccacgtatttaaatatctagattttcttccctgttcagacacaaaaaggttgtgaacaaccagtgatattcccagtcccagttatcttcaattatacaataaatatgcaatgatctaagaggggcagatcccggtctgatggggtctgaagcttatgcagtttggggggggtccactttcagattaaaaaaacatagaaaactaaaatttaaattgggtatgaaaatgaatgtttactcaaaatgagaaaataaatcacaacaaatagcaatttgttaaatctgattaatccagaaaaggaatcaaaaaatccagaaaaggggctgggcacagtggctcacacctgtaatcccagcactttggaaggccgaggtgggcagatcaattgaggtcaggagttcgccaatgtggtaaaaccctgtctctactaaaaatacaaaaattaactgggcgtgatggcacgcgcctataatcccagctactcgggaggctgaggcaggagaatcagttgaacccaggaggcagaggtcacagtgagccgagatcgctccaccgcatgccagcctaagagacagagcaagacttcatctcaaaaaaaaaaaaaaaaaaaaaccagaaaaggtaatacaatatttttagcaatttgctggctaacatccctgtataatacatttttcctacttttttactgcattgtctttgatcacttctttgtaggacaatgattttgttaaaatatatggagagaatagaaggataaaactcttttttctctaacatggttccttgaaatttgcttcttattattaataattctaagctctagagctgttgttacatttttaaagtgcttagcaaatattgctcattttccacagactgcacattgatgctacatttcaagacctgtttctcctccactttccccatgctcctggggctggatgttgtgggacattcatatcacgatatcctctagccccacacctttatgtcactgcacctgaatggctaggaacaatgtgagcagatatggaagggactataaacacagaaacatatctcactaaacccagattaaatgcactcacaaatcaacttccactgagctgtattctccaaatgctcatggccattctactaccaccaacacaaggagaaaagtgacagagggcaagaaaaatgggatgcacagcaatgctgaccaatgacagctaaaatgtctttttttttttttaagtgagacagggtctggctctgttgcccaggctggagtgcagtggtgcaatatggctcaccgcagccttgaactcctgggctcaaatgatcctcccacctcagcctgccaagtaactgggactacaggcatgtaccaccgtgcctggctaattttattgttatttttcatagagacagggtcttgctatgttgcccaggctgctcttgaaccctggccttaagcaatcctcctgcctctgtctcccaaagtgctggaattacaggcatgagccactgcacctggctctaataatatcttaatttttagtattttactaaagtgtgtgaccacatgaacacatggccctgaggcatagtcttctttagcttgactgtaaatctccctctgtggtggtatttcatcagctcctacccttcttccctcaccacatcacctttcccacctcagctcccaggtctgggtgctcttttgtgtcctcatgcacttagagactcttttgttgccaaccagacccaaagttgatttctccactgatctcctcttccaagtcattgtccccagtttctgggatggacacctgctttgtccctgctgtcatactctgtatttttttttttttttttgaaacggagttgcccaggctggagtgcagtggtgtgatctcagctcactgcaacctccgcctcccaggttcaggcgattctcccggctcagcctcccgagtagctgggattacaggcacccgccactatggccggctaattttgtatttttagtagtgatggggtttcaccatgtgagccaggctggtctcaaactcctaacctcaagtgatccacccttctcagcctcccagagtgctgggtttacaggagtgagccaccacacccagcctcttactcttgagagttgcttctcccagagcctggaattctgaccattaaccctagcatggtggtgggtccactttcttacagaaaggctcttagcaagggtcatcactgccactgctggactctgaagttcagctgccccagacactcccctcacttgtacttggcttggtagattatgggagccataatctaccaagattatgctcttgttagattatgctagctgctccctcttagaagtgctaggaactgctgggtacggtggctcacacctgtaatcccagcactttaggaggcccaggcgggtggatcacaaggtcaagagttggagaccagcctagcctacatggtgaaaccctgtctctactaagaatacaaaacttagccaggcatggtggtgcatgcctgtatctcaggtacttgggaggctgaggcaggagaatcacttgaacccaggagggagaggctgcagtgagctgagatcgcaccaatgcactccagcctgggtgacagagcaagactctgtcttgggagaaaaaaaaaaaagaagaagtgctaggaactactgtttgaacagcagtggcgcacgttatgccctttggaccctgaactttggactcagttccttgtagagggatcctcagatgtccccaaccataagctctgtcatggcccaatttctgagccaactgaaaagctgggaatgctttagataacctcaagcctacttcacttcccatcctcccttaggaaagcgaaggcgctgacttcagtcacctctcattctctctttcacccacttgcaacctggcttttagcatactgcaccgttccactcccggaaacccattacctcaaaggtttctagaggtggcactcaagtggctttttcaaccctcgtcctctctaattttctgccatgcccaaactattgaccactacttattaaaactctttcccttggtttccatactaccagcattctcatctgtctctctgtgactccattttcttccttagattccttccctaagcatcccttaaaatcaggccttccccacggtctgcctctccatacactcttccttccaaatgatctcccttgcttcagtgataacctctaatcatgactcctgaatctacacatggagctctggcctctctcccagactccagcctgtatttcccgactgttttttagatatgccacatgcatgtcccacttgaattcaaactcccctaaccgatgctgaactcctaatcatcactcagcaaacactcttcttcctgtgacaccccccaacctcgtctccatgaatgaatggcattaccacttaccctgggctagcaatctctagttttctccctccttcctgcagcgaacctgctagatcaggtcatgtcaagtctaactccatgacccctctcaagcccatcctgtctattccatttccacggccgtctttccagtccagccaccagttctttgcatggagactctcacagtgggcccctcattgatttcactgcctccaagttaccctcagtccaatttctcctgcatactattgacttccatctttctgcaacacagattagttcatgtacatttcctattcaaaaaaaaatgttcatacttaaaaaaacctccagactcctggatgcggccctgaacatcttcttcatgtgcctccaacttaactccgctgcctcatcttcctcgtaatccccatgcacagcacgactgagtagcctgcccagacctctgacagcctggcaccacacacacccctcccatgcaatcctctcatcctttaaaccagacattcttcttcttttttttttttctttttagagagggggtcttgcatgttgaccagcttggtcttgaattcctagcctcaagcaatcctcctgcctcagcctcccagtgtgataggattataagcgtgagccaagtcacccggccttaaaccagccaatcttcttaatccagggaaccatcctctccacaacgttggtctggaatgatgtaagtttaggggattattttatagttcacatgtatgtatgtatgtatgtatgtattttttattattttttattatttttattttattttttattatttttattttgtgatggagtctggctctgctgcccaggccagtgtgcagtggcactatctcagctcactgcaatctccgcctcccagattcaagtgattctcccacctcaacctcccaagtagctgggactacaggtgcgtgccatcacacccggctaatttttgtatttttggtagagacaaggtttcaccatgctagccaggctggcctcaaatccctgacctcaagtgatctgcccacctcagcctcccaaagtgctgggattacaggtgtgagcctcacacatatttagatggcgatctctctcacctattaatcagcaagttttcccggggcaagcagcaggtcttactggcactgtttttctgcatcctgggtgcagttctgctgctctcagccgttgtgcctctgcttatcagctcatgatggttactgtgaaggctgaactcatgtggcatggctgggttgcttgggggaaagggcctgagcctgccaccaaagagacacagcttttcaactgaactatatcacttattaatggtacaacttagagcaaatttcttacccactcctaacctcaatttcctcatcaataaatcaaaataatggtaacctgatacagaataagtgacatgatatatacaagagtgtctggacatagaaggctctcagttatggattggatttgttatgctctccctgcaaagcccacctctgtttttcgtttttgttttttaacctgaaaaaaaatcacaatccgaaaaataataacgatttgaaattttaaaactaaaaaaaaaaatcgaggggataaaactagtagctaatatagaaaggtgataagtgctataaaatttgtattatagtgcttaccacatcatattataataatttatgggctgtgtgtctcttctgtgagctttacaaggaaaaggactatgaccctttatccctaacaccagaacaggtcttggcatggaggaagcattcaggatatgcttattgtctacttgaagagcaatttcacaatatctttcacgaattacattgcacctaccctttgccctaaatattccacttctaggaatttatcttacagataaacttgtacaagtatgcaaagagataagggtcccaaaaaatgtgcattgtgacattgtacataatagcaaaccaaaccaaccaacaaatcaacaaaaaatacttttttttttttttgagactgagtctccctctgccgctcaggctggagtgcagtggcgcgatcttggctcactgcaagctccgcctcccaggttcacgccattctcctgcctcagcctcctgagtagctgctactacaggctcccgccaccacacccggctaattttttgtatttttagtagagatggggtttcaccgtgttagccaggatggtctcgatctcctgacctcgtgatccacccgccttggcctcccaaagtgctgggattacaggtgtgagccactgcacctggccaacaaaaaacactttaaatgtccataattaaggtccagtttaaaaaacaaataaagacataccaaggaatactatgtaatgttaaaaaaaaaaaatgtgcagtagatctccagatactggtatgaagaggtgcctaataacatattgctaaatgaaaaaagccagctgcatagtgcaaatacacacacacacacacacacacacgtgcctctatgtgcaagaacaatttcttgaaggatatatggggaactgtttctagtggttacttctatagactgagactaagaaatcaggagtgggaggaaggatttccacactcactgtatatcctgtgtacaatttgaactttttaccatgaacaggaactaattttgaaaaataaaatataaatgtaaaaaatgaaattagcaaaaaatatttgttgaataattcaactttgggcttgtctgggtagcctttgtgtgtttgattattaatttctatcagcaggataaagaaagtgatagatgtgcaggctcctttcgtttcccttgatgtaagttcaaagaccataaggaacaatttagggaacactcagttgctcagcgggagtcccttgtggcttatcagtgtcactaagagcaccagatgcatttataatcccatccgtaagtgtcgattgtggcttgttctccatgatcagttaccagccccgtcttacactctgttagcagaaagcacatcctcaccaggacaaaagggggtatggagaaaatcagctttgctgattgtctctgcagacttcactgctctttccctgggagccatgtgctgccttaacagttggcccagagctggcactgcataaaggagaggaatctatagcagcaagaggtggtgattaattttaagctgtcatggaaaatgtttttgcactctaatgtcagagaactgtattattattataggtctaacgttttcttgccaaagctgtgtgtttgctctcaggatacaaaatgaatacagaaagctttctggttggctgtcagtagcatcttttggagaagggagaaaaggaaggctgccaaaccagccaggttccacagcagccctcatggggcaggtccttccccacctgccccctctccctgccccaggctggaggaagccctggccactcccttctgccctaaatgttgtccagctgaatacagttttgctctctcagccatctgacccacaaagtctactggaaatctcagataggggcagacaccctggagaagcaaaggatagagaaagtcaagatttgatagaaaagaagacaagactgtagccgcaagtagggaaaaaaaaatgggccgagagcaacaagtccacggaggtctttaagatccatgccatctgggtctgagtcagaaacaagtacagcaaacatgtgtgccctaccaccactctcccttcctgctatacacacagagggagaaagagaggaggaggaagagggagagaggcaagaactgactagcttttggacttcaatacaatatttatttcttgcataatctgccagcaaattagatcaaagagctgtcggttttttaaatcatgcaattcattaagggaacaaactttaaatatacttagtctaaaataacatttaccaagaggcaggattgatttatctagctagagcagatctaggaactggaagagagtacaaaaaaaaaagagagagaatcagaatactgactttatagcactttcaaaaaacttgagataatcatgttaataaaaatggctatttattgaggtctaccctgtgccagaccaggcactttacaaagtgtttatctgtaatcctatcacatagtaaatatagttattctcatttttcagatgagaaatctgagaattggagaacttgcaaagggcacctcacaagtaagtggtgagtactgcccatctgtctgcctgtctgcttgtctgtctgtccactggaccaggctgctctgtggtatgcactatcaagagggatacatgcagtatccagtctacataaaaaaaaattttttggcaaggtgcagtggttcatgtctgtaatcctagcactttggaaggcggaggcagatgaatcacttgagctcagaagttcaagaccagcctgggaaacatgataaaatcctgtctctaaaaaaatacaaaaattagccaggcatggtggcgtatacctgtagtcccagctacttgggggtgctgaggtaggaagatcgcttgaacccaggaggtcgaggttgcagtgagctgagacagcaccactgccctccagcctgggtgatagagtgagaccctgtatcaaaaaaaatttttttaattgattcataatatttgtatacgaatatttgaatatgtatatatgtataaggtgcattcaatattttgctacatgcatagaatgtcatgatcaagtcaggtatttgggatatccattacctcgggtatttatctttttttttttttttttttttttgagatggagtcttgctctgtcacccaggctgaagtgcagtggagtgatctcggctcactgcaacctccacctcctgggttcaagtaattctcgtgccttggcctcctgagtagctaggattacaggcatgtgccaccacacccggctaatttttgtatttttactagagacggtttcaccgtgttggccaggctggtctcaaactcctgacctcaggtgatccacccacctcagcctcccaaagtgctgggattacaggagtgagccaccatgcccagctggtatttatcatttctatgctttgggaacatttgaaatctctgctagctgttttgaaatccacaatttattgttgttaactatagtcaccccactctgctattgaacattaaaatacattcctcctatttaactgtacgtttgtacccataaaacaacttctcttcatctccccagtaccagacacagacacacacacacacacacacacaccatttccagcatctgctttctatcattctgttctctacctcaatgaaatcaacttttaagtctcacatatgagtgagaagatgtgaagtttgtctttctgtgcctggcttctttcacttaagttaatgacctccagtaccatccatgttgctgcaaatgacatgatttcattcttttttgtggctgaattgtattccactgtgtatatgtaccacattttcttcacctgtttgtccactgacgggcacttaggttgattccatatcttggctattgtgaatagagctgtaatgaacacgcaagtgcaggtatccctttgaggtacagatttcttttcttttgtataaatgcccagtagtgggattgctgaatcatatggtagttctatttttagttttttgagaaatctccatactgttttccataatagctgtattaatttgcattcctgccaatagcatataagcattccctttcctctgcatccttgagagcatattattttttgtctttttaatgacagccattcattctaactggaataagatgatgtctcattgtggtttgatgctgagcattttctcatatacctgttggccatttgtacagtctacatttttttttttttttttgagatggagtctcactctgttgccaggctggagtgcagtggtgcaatctcagctcactgcaacctccccttcctgggttcaagcgattcttctgcctcagcctcccgagtagctgggactacggatgcataccaccatgcctggctaatttttgtatttttagtagagacggggtttcaccatgttggccaggatggtcttgatctcttgacttcgtgatccacctgccttggcctcccaaagtgctaggattacaggcatgagccactgtgcccggcccagtctacatttttaagccattcttagatttaaatgtttctttttatagctcccttattcaaccattgatagaacccaggtcctaactaaagctttaaaaatatatatatattgttggccaggcgtgatggctcatgcctgtaatcccagcactcaagtgaatcacttgaggccaggagttcaagaccagtctggccaaaatggcgaaaccccgtctactaaaaatataaaaattagcccggcatggtggcttgcatctgtaacccagctactcagaaggctgaggcatgagaatcgctggaacctgggaggcggaggttgcagtgccatgatcacaccaccacattccaacctaagcaatagggcaagactccatttcaacaacaacaacaaaaaaagggttcctgtagctataccagtactggctacaataagccaatagcagaagctgactttgtacccgtgaagcattgctatgtttcatggaaatatttggctttgatggaagcagattgaaagccaactcttatacatattacctgctacagtgtctacagctatatctgtgtctggtggagccatagctacctcaaggtagtaggagaataaaatgacatactgtataccaccacttctggatctctcctctgggctccagaatcatgtaactgatgccacttggataccctacatatgcctttaactcatcatgtccagaactgagctcagcattttcccctaaactaacttcttctgggtttccatcagagagaattgcccctccagtagtaactgggtgagatccctaaattcctatctcccacatccaacagtcaccaagtcacatcaattttactcttaatgcctccgacgcacccactgctctctctgtatcactacagtcttttttttttttttttttttttttttttttttttttttgagaaggagtctcgctctgtcacccagcctagagtgcagtggcgtgatctcggctcactgcaagctctgcctcccgggttcacaccattctcctgccttagccttccgactagctggaactacaggcgcctgccaccacacctggctaattttttgtatttttagtagagacggggtttcaccgtgttagtcaggatgatctcaatctcctgaccttgtgattcgcccgtctcggcctcccaaaatgctgggattacaggcggcagccaccgcgcccagcccactacagtcttaatttggggtgtcatatgtgaccccactcctgcacctgcccctccccactggcctccctcttttgaaccttgccctctccaaatcattctccacgttgatttcggagaatgtattctaaagagcatatctaatgatgccatttcctgcttaaaatctaatgacctccctaattgcttccagatatatttgtcattgttgttgttgttgagacagggtctagctctgtcccccaggctggagtgcagtggcacaatcatgactcattgcagcctcaaactcctggactcaagcaattctcccatctcagcctccagggtagctggaaccacaggcacgcaccaccatgtccacttaattttttttgtagaggctggatcttactatgttgcccagactgagcagtaacagttgagctccatctcaaactcttgaactaaaacaatcctcccaccttggtgggaattgctgggactacaggtgtgtgccaccatgctcagctaatttatacatttttcgtagagacagggtttcaccatgttgcccaggctggtctcgaactcctgggctcaagcaaccctccctctttggcttcccaaagtactaggattacaggtgtgagccacctcacccagcgtagatatatttgtttaatagcttcagtaagatgtaattcatatatcatgcaatttactttcttttttttcttttttgagacagggtcttgttgtgtcacctaggctggagtacagtggcacaatcacagctcactgcagcctcaaactcctgggctcaagcatttctcccatctcagtctcctgggtagctgagaatgcaggcacacaccaccatgactaatttttttttttttttttttgagacggagtctcactctgtcacccaggctggagtgcagtggtgcgaccttggctcactgcaacctctgcctcccgggttcaagtgatcctcctgcctcagcctcccaagtagctgggattacaggcacccgtcaccacacctggctaatttttgtatttttggtagagacggggttttgtcatgttgaccaagcttgtctcgaactcctgacctcaggtgatccacctacctcggcctcccaaagcgctgggatttacacacgtgagccaccgtgcctggcctaattttttgcttttttagagataggatctcattatgttgtccaggctggtcttgaattcctaggcttatgcaatcctcccgccttggcctcacaaagtgctgggattacaggcatgagccactgtgcccagcctaattttttgttttttttagagataggatctcattatgttgtgcaggctggtcttgaattcctaggctcatgcaatcctcccgccttggcctcgcaaagtgctgggattacaggcgtgaaccacctcatcagagtacccatttaaagcccacagttcagtggttttttagtatattcacagacttctacaactatcaccacaatcaatttaggtataatcaatgtttactgtcattacctaaaagaaaaccccattccctttattagtcactctctacttctccccaacacccttatcccctggcagtcaattacctactgttctgtctctgtggatttgcctattctggacattgcatatctagagagtccatacagtatgtgatcttttgtgactactttcacatggcacaatgttttcaagtttcatctatgctgtatcatagatgaaaaaggaaagtttcattcctttttatggctgaataatattccattgtttgcatagaccacattgtgctactccagtcatcatccaccaatgggcatttgggttgttttcactgtttggatattatgaataacactgctatgaacattcacttacaactctttgtttttatttctctttcgttttatttctcttagctagagagaagtagaattgccaggtcatagggtaagttgatgtttaactttttaagaagctgccaaatgttttctaaagaggctgtgctccccccaccgcactccaccaacacaagccactcaacatggtccttcctaatctagttgcagcttgttgtaccaccttcatctctactgatgctcctactcaaactggatacttcaagtaggcccaacttcaccagccctaaaaaacaaataatccgtctcactcgggcttctataaacatggttccctgtgccaggactactcctccctaccgtaatctccaggctcacgcccacgtgtcctcagactcagtttccttggcatgtcttcccaggtcctccacaagactggcgaggcctctgtgctccctcatgtgccctgagtttttgtgctccagtggctcttctcatatgacagggtcatcacctatgcactggtctttacctgacagtgtttggatttgtgtccacacccaaatctcatgtccacttgtaatccccagttttgcaggtggggcctggtgggaggtgattggatcatggtggcggatttcccccttgctgttctcacgagatctggttgtataaagtgtgtggcacctcccgctctctcttcctcctactccagccatgtgagacatgcctgcttccccttcaagttccgccatgattgaaagttttctgaggcctccccagccatgttacctgtacagcctccagaactgtgagccaattaaaccctccttcataaattacccagtctcagttatttcttcatagcagtgcaaaaacggactaatacattattcttcaccaaactgtaagctccctaaggataagaattacaccattttcctcagccaagaacagttcctgatatgttggtggctctccataaatatttgatacatggataaagcccccagcatatagtaggccgtcaccctcttccctactatattgaaagtgtgatgcaagaatccaaaacttcattctttccaaagaaaatcgttcccaaaccatcttggaaatgcacagtctgattttaaaaataaaacatttgtagttccttcctgattctgttttgtacgggctaataataaaatgagttggcattccttgggtatatatcaactaacagtagagggagccaagccaagaatgtgctaggtagtgggtaggaatctgcatgcgattaaaaataggccatgtgtaataatggaggaaaactactcaaatggtcagcaattaggaaatagttcaataaattctggtattagatagataggttatattgccattaaaatcataaatatggaaaggtttattcaaaataatcctaaaaataaaactaggacacgaattagaatatgcactttgattacaagtatgcaacactgtgtctgtataatctcataaaaccctattcgttccaggtattttgtagtaaaatttaaaattggggattttttctcagttttttttaagcttttgttgtaaaaacctatgacaaataattgtcatgcattgtttccaaagtgtatatcataaaatggacatagtgagctttttgatctaaggctcctaaaggtactgtttataatttgttggatgtatacgacacattgcattccttaatttaaaaatatatatgtataggctgggcatggtggcttacacctgaaatcccagcactatgggaggccgaggtgggcagatcacctcaggtcaggaattcaagaccagcctggccaacatgatgaagccctgtctctactaagaatacaaaaattagccaggtgtgctggcagacagctgtaatcccagctattcaggaggctgaggtgggagaatcacttgagcccaggaggcagagtttgcagtgagccgagatcgtagcactgcactttagcctgggcaacagagcgagacctcctctcaaacaaacaaacaaaaaatatatatatacacacacacatacgtatttatatattaatgtacgcatgtatgcttacatgtatttatttcatagtgctcttagagaagacaaaatgttttcacattttcattgcactttgcctccagtacttctgggagtcagacagaacaggagctattgtattatcctctctttatccatttgactttacacacaaactgaaactgacttgctcaaagttacatagggtattagtttgctctcacgctgctaataaagacatacctgagactgggtaatttataaaggaaagaggtttaatggactcaaatttccatatggctggggaggcctcacaatcatggcagaaggcaaaggaggagcaaagtcacatcttacatggcggcaggcaagagagcatgttgcaggggaactcccctttacaaacccattagatctcatgacacttattcactaccatgagaacagcacaggaaagacctgcccccatgattcaattacctcccactgggtccctcccatgacacatgggaactagaggagctacaattcaaaatgagatttgggtggggacacagccaaactatatcacatagttagcaaggatcagaaccaagatcagagcccactccacactaatacaacctccttcactctgcccagaaacctgagcaggaaagactccgtggactcaggatcagcaaagttccttgctaaagaagcttgcacagcatcttgccctaggagttgctcaaggagcatttgttcaaaggattgatatacatcaatagcttgatgggtccatcagtggataggaatttaacagatcacaactaatcagataaaattctttggcactctctggtgtcagccttcaccaaactcatatcattgctactttaaatgttttctctaaaaatatttcatttgttcattcagcaatcaaatattagacaaccactaagtataagaagctgtgttagcagctttaggagtcaaagaaataaaatatcattcttgcctttaacatagttacaatccactaggagaataagactttcattttatttatttatttatttttatttttttgagacagagtctcactctgtctcccaggctggagtacagtggcccaatcttggctcactgcaaaatccgcctcccaggttcaagcaattctcctgcctcggcctcctgagtagctgggactacaagtgtgtgccaccacacccaggtaattttttgtatttttagtagagacagggtttcaccatgttggccaggctggtctcaaactcctggcctccagtaatccacctaccttggcctcccaaagtgctgggattataggcatgagccaccgtgcccagccaagactttcatttttagaaatgctataatacctggcagaatatgaggtaaagagagatataaacaaagtgttcagaggaaaaagaaatgatatttagttaaaagaatagaggcaaatttcatggaaatgtggcatttcagcagcactttgagtgacaggtacaatttcacaagaggcaatgggggaggacatttcagggagaaacaaagtgttttgttttttttttttttttttttgagacagtgtcttactctgtagcgcaggctggagtgcattggtatgatctcagctcactacaaccttccactcccaggttcaagtgattctcctgcctcagcctcacaagtagctggaattacaggcacccaccactacgcccggctaatttttgtatttttagtagagacagggtttcaccataatggccaggctggtctcaaactcctgacctcaggtgatcctcccacctcagcctcccaaagttctgggattacaagcgtgagataccacgcccaaagtgttagccaaggtactagatcaaaaaactttgcaaaagtgaggatcttaggaacgctccacgtccttagagaaacacatttcagctaaaatgtattctcttttttccaccatcgccttttctagtctctttgtctgacataagacagacagttccttagtcatctcatctgacttgcccgcaggtgctagagatagagtcacagatacacaagaatatactggaaggctgtgtctgttaatttgctccctttgatgaacacagtagaaagtattatattattagccatgttttgcagcagcatgtgaaacaaaggtgcagagagactgggaacttttcaaggtcacagaaggagccagctggaaggaaaccctagaaccacagctgcacctctccagaggaggctgtgtggcacatctttgtgaggggacagtgtgttcccacccaataccttctgcacccttttgccagggagctcagcatgctatgcagacgttatttaatgagttctctcagccccatcgtggttgaagtcgggtgaaggcatgtttgtattcttttctcaaattaacaaactgaagtccacagggtatcctagcagttcatctgagagcaaggaatctatgtgagagttaagccaacaactgacccaagcgcaatgttttgtttggcccttgtgttaggaccaaatgttggctagagaggttggaacgtgggccgggcatttttagacccaaattctgatcccagctccactatatgcctactgtttgaacttggtcactggctcaacctctctgagtgtcggtttctgcatctgtaaaatggatacacatctgtagctgtcacatacatattttgagtggtaagaaaaggatacaagagcgtcccctcaaaaccatgaaaaatgtttactttaggggaaagagtagaactggtaggcttctatttggcttgatgtacttctttttcatttggaattgtttacaagaacctggacagcaaataaaagataagaataataacaatgttataaattaccatataggctgggcatggtggcacacacttgtaatcccagcactttgggggctgaaatggaaggattgcttgagcctaggagttagagaccagcctgggcaacatggtgaaatccctgactctacaaaaaatacaaaaattagccaggtgtggtggtgcacacctgtagtcccaggtacctgggagggaggctgaggtgggaggatcacctgagcccaggagttcaaggctgcagtgagccaaggtctcaccactgcactacagcctggtcaacagaccaagaccctatctcaaaaaatagtaataataaaaagaattttttaaaaattattatataaaaaatctacatggtaatttccaaatactaccttcccaataaaagttaattttaggccaggcacagtggctcacacctataattccagcactttgggaggccgaggtgggcggatcacaaggtcacaaagaccagcctggccattatggtgaaactctgtctctactaaaaatataaaaattagccgggcatggtggtgggtgcctgtagtcccagctattcaggaggctgaggcaggagaatggtgtgaacccgggaggcggttgggccacttcactccagccggtgacagagtaagactccaactcaaaaaaaaaattttatttttatatgtaaaaagtaatcattatgtcctgtggcaaatatgtcctgtggtagaatataagacagaaaatcaaggaactataagagcataacagtttctaatcaagattcagattctttgggaggtaatggatggtatagaaagaacacccaggcacctagctttaaatcccatcactggccaggcgtggtggttcacccctgtaatcctagcactttgggaggccgaggcaggcagatcatgaggtcaggagatcaacaccatcctggctaacatggtgaaacccaatctctactaaaaaaaaaaaatacaaaaaaaaaaatcccatcactgccacatccttgctatgtgacattggagaagtcactgagcctctctgggattcagtttctttatctgtaaatggagatttaaaaaattttaccttggtggggcgcagtgggtcacacctataatcccagcactttgggaggccgaggtaggtggatcatctgaggtctggagttcaagaccagcctggccaacatggtgaaaccccgtctctactaaaagtacaaaaattaactgggcatagtggtgtgtgcctgtaattccagctaatcaggaggctgaggcaggagaatcgcttgaacccaggaggtggagattgcagtgagccaagattgcgccactgcattccagcctgggcaacagagcaagaccctgtctaaatatatatataatatatattaatatatataatataatatattaatatatattatattatatatattaatatatattatatatattatattaatatatattatatatattatattaatatatattatatatattatattatatatattatatatataatatatattaaatatatattaatataatataatatatataatatatatatataatcacctcatagcttgtctagaagatgaaatgagacaaacatttaagtgtaatagaaggcattgattattacatttagtgtgggccacggaaatgaaaaaagacgctgtgtacacctacaaagcttctattccacctgcttcctgcaggtagattgctctgtagagtgtctacaagattttatcaggggaatcacctaaattgtttaagctatacatgattcttttgaaaatatcttaacagcagctgggtacagctctgctcatgcctctaattccagcactttcagaggctgaggtgggcagaccatttgaggacaggtgtttgaggccagcctgggcaacatagtaaaaccttgtctctacttaaaaaaaaaaaaaaaagctcagcctggtggcatgctcctgtaagcccagctacttgggaggctgaggtatgagaatcacttgtacccgggaggcagaggttgcagtgagccgagattgcgccactgcactccagcctgggtgacagagcaagattccatctcaaaaaaaaattaacagcaatcaatgaaagccaagaaagcaaattgggaaccagccaacgtgcatccacctttagatctttctgagcaagacagggttttcaagcccacatatttgtggttaagtgctggcctgtgctttcctggtacttcccgactacgtgtttctccactgcacctctcagtagcagatgtgtgtaaagagccataaactcagcaacaataggtgggaacatgcttgctttcctctggccttccttgttctgattaaagggtcctttataggatctggcaagcgtgctctgtttggtgtactaagcagacagatatttctataggaagttctatacactgagatgacctttccttcaaatcagagcaggtggcgacgccccactccccaactgctagggcctttctgagtctgtttcctcacctctgagatgaagcaggctcatcgtcatgagggcaaaacatcatggcttgttgagagatttaaaccagacagtatctatggccaaggttttgcaagttggagacagtaaaccatctggaagaacatgcacaagtcatgaagctgaggtggggagatggcttgaggccagcaatgtgagaccaatctgggaaacatagcaagaccctgtctctacaaaaaattaactgcacatggtggtgcctgcctgtagtcacagctacttgagaggttgaagcaggaagattgcttgagcccagaatttcgaggctgcagtgatctatgattgcaccactgcagcctgggcaacagagcaagactctgtctcttaaaaaaaattatatatatataatatataaaatatattatatataatatattatataaaatatattatatataatatattatatattatgtaatatattacatattatataatatgtaatatattacatattatataatatatataatacatattatataatatataatatattacatattatataatatataatatattacatattatatattatataatatattatgtataatatattacatattatataatatataatatattatgtataatatattatatataatatataatatattatgtataatatattaaatataatatataatatattatgtataatatattaaatataatatatataatataatttatattatatataatatatattatataatatatattatatataatatatattatatatagtataatatataatatattatataatatgtaatatatataatatataatattatatattattatatattatattatattatattatattatattatattatatatatacacacacacaagggaagctgagatccctaacaatagaactaactgcaactacaggatcaatttctttgcctaaagagaaccttcatgaaaatgttctaaaactgaaagaaaaagaagtattttgctttcaaattttatagatgatttcttttcaaaaaaagtctcttactcattttgtcctgaatctcaattttacattttcttgcctgctggctattttttttttttttttaagaaacatgatctcactatgttgcccaggctggccttgaactcctgggctcaagggatacctccagcctcagcctcctgagtagctgaggttataggcccataccacagcaaccagcttcacccatatgctttgatgtcgattcagtgctgcagcctgtgtttctgtgttttattcatccctctcacctctcctcctcttttctttcctgctgcttcaccctaccatgaacatttctaggcagtaagtggacattctgcttctgagatgggggagctatattgcttagatgaagctgagagggaaggtagtggctaattgctatgtcaatagcagcctctcttgctagttctgtctcttaatgaaaccacgcaggaagacaacagctttttttttttttttttttttttttaagatggagtcttgctctgttaccaagctggagtgcagtggcgtgatcttggctcactataacctccgcctcctggatccaagcaattctactgcctcagcctccggagtagctgggactacaggcacgtgccaccacacccggctaattttttgtatttttagtggagacagggtttcaccatgttagccaggatggtctcgatctgttgacctcgtgatccgccagcctcagcctcccaaagttctgggattacaggtgtgagccaccacacccagccaacaacagctttctaataagtcttctcttctttcatttattgagtgttttcggttgtgtcagatacatgcaaagcatctttcattacgtgttgcttataatcctcacagcactctgtgagacaggacttttatctacctaacagataaggaaaaagagtctaagagcttacgtgaattgttcaaggccaggcagctcattaatgacagaattggaattcaaattcaggtgccttcatcttgccaggtgtgttgagaagtagaagtgagggagcagtgtcaaggcaagaagagaggctccaagagacttgatagaagataaatacatgagggtcccttgagcagtggggaccctttctctgctcctgggcaatacaaaacttgagtggtgttcctagccatgcccaaggttcccgtgctataattaatttttaatgaagagctggccaggtgtggtggctcacatctgtaatcctagcactttgggaggccaaggcaggaggatcacttgagctcaagagtttgaaaccagtctgggcaacatggtaaaaccccatatgtacaaaaagaaaaaatgaaaattagctgggtgtggtggcacgcacctgtgcacacctgtagtcctagctacccaggaggctgaagtgggaggctcacctgagcccaggaggttgaggctgcagtgagctgtgatctcaccactgcactccagcctgggtgacagagcaagacactgtctcaaaaaaaaaaaaaaagagagagagagagagacagcgagaaagaaaggaagaaaagaaaagaaataaataatatagcggttatattttaacaggtacttttgaaaattttacatgctgtaattaatttattcctcacataaactctatgagttaaatacaataattcttcccattttattatattttagagacagggtatcgctctgtcattgagaactggagttcagtggtgcgatcatagctcattgtaacctcaaactcctgggttcaggcaattctccccagtcagccgggcttacaggcatgcaccaccacacctggctgattttttaaatttttttgtagagtcaaggtcttgctatgttacccagactggatctcaaactcctagcctcaagcgatcctcctgccttgcatcccaaagtgctggaatgacatgcacgagtcaccacaccggcctctctccatttcatagattaagaaactgaggctcactatttaaaccagggggatttggctcctgtgctcatttttctttttctttttttttttttttgagatggagtcttgctctgtcacccaagttagagtgcagtggtgcgatctcagctcactgcaacctccgcctcctgggttcaagcgattctcctgcctcagcctcccaagtagctgggattacaggcacctgccacagcgcccgactaatttttgtatttttttttttttttttttttttttagtagagacagggtttcaccatgttggccaggctggtcttgaactcctgacctcatgatccacccgccttggcctcccaaagtgctggaattataggcgtgagccaccacgcctggcttcctgtgctcatttttctaaccatttttctgataattctgtacttctgggtctgaaggagcccgtagattatgtgattctgtatgttagcaaaaatgatctgtgagtgggcatgtcccaatgtcttgaggctatggaagatcccagaaccttgcagtatctggggaaggggtcacaccaaggacgactgaggccaatttcttgtctgtagagcttgatagatgcttagtgttgaagttaaaattatttaaagaaaatacatttgtgtgtgaaaaacaaattcagatatacctttagccactggcgacaccacctgctatcctacgagaatttttatttgacctggtacaatctgaccctcactgtccacccctcttccttcctgaaatgtgcagggctgtctttcttttttttttttttgaaacagggtctcactctgtctcttaggctggtgtgcactggcacaatcgcagctcactgtggccttggcctcctaggctcaagtgatcttcctacctcagctaggactacaggttcgcaccaccacgcccagccaattaaaaaaacattttttttgtagagatggggttttgccatgttgttcaggctggtcttgaattcctggcctcaagtgattctcttgcctcagcttcccaaagtgctggaatgacaggcgtgcaccaccatgcttgacctaaggctgtctttcaaaagcgacacactgtctctctctcccccacctgccctttgtgactcatttcaggagatgcctttgttgagaagctctcgctgacactccccgactgactccaaggccccctcccagttcacacagctcactatttatttttcttttatttatttacttttattatttttatttttatttttttgagatggaattttgccctgtcacccaggctggagtgcagtggcacaatctcggctttctgcaacctccacctctcaggttcaagtgattctcctgcctcagcttcccaagtagctgggatttcaggcacgtaccatcacacccggctaatttttgtatttttagtagagatggggtttcaccatgttggccaggctggtctccaactcctgacctcaggtgatccaccctcctcggcctcgcaaagcgctggatgacaagcatgagccaccgcacccagcctctttatttttctatttcaatgcttggtttgcttgtgcatctgtgtcccaacatggtaagcaatttgagggcagtgcctaaatttttttgtgcattaccagtgcttaaccaatgtgtaggcttgacataaaattggccctcagtacttgtttgttgaaagaataaatggatgaatatataaggaatacacaagcagcaacaatagctacaacaaataattcaatcctgctccttacatctcgtacctcaggtggccaagtagcaccacatcaattcaacagttttattttttgagatggaatttcgctctgtcatccaggctggagtgcagcgggacaatctcagctcactgcagcctccacctcccaggttcaagcgattctcctgcctcagcctcccgagtagctgggacgacaggcgtgcgacaccatgtttagctaatgtttttgtatgtttagtagagatggggtttcatcatgttggccaggttggtctcaaactcctgacctcaagtgatctgcctgccttggcctcccaaagtgctaggattacaggcaagagccccctgcacctggctgtagaaagatttgttgatctgtagaatggaggagcagagtactggcattttgcatcagaatatcttaaaagcaacgaccctgggcagagacttcttgtctgtaaaaaaaaaaaaaaaaaagtataataggccaggtgcagtggatcaagcctttaatcccaggattttgggaggccacagcaggtggatcacctgaggtcaggagttcaagaccagccttgccaacatggtgaaaccccctctctactaaaaatacaaaattagctgggtatggtgtcgtgtgcctgtaatcccagctacaggaggctgaggcaggagaatcacttgaaactaggaggcagaggttgcagtgagcccagatcgcaccactgcactccagcctgggcagcaaagtgagactctgtctcaaaaaaaaaaaaaaaaaaaaggctaataatcatccttttatcacaggattgctgggaggtcaaatggcaaatggatgtgaaagcactttagaaactacaaagtgacatgcaaatgttagtagctgttattttattgttattattatgtgcaaggcaccatgtcaggccccaaaggaggacttaaagatgagtaatccactgcccacaagacacccacaacataatgaggtattcaaaggactatgaaataaggcagaaaataagagatgttcgaagacctataggggctcaaaggagagaaaaatcatggatcaggagtcaggacagcccattcatccaaggccttgtgggagtgctgtgggggtttaatagcaaggtccctactctcaagtccttgatggtcatatatggtgctgcatgagactgaaatacatggtatttgagcatagagagcttttccagtgaaggcatctggaagatccagtctagatctaaaagagtgagtgggacttaggttagaggaggaggaaaagatggtctttggagggaggaggatgcagacaaaggcaggattgagcttggagagactgggaaactcctcctaggggagcagagcagaaggttcctgtggctgggctgctcatgacccagggcaaggcatcaaaaagcaagcaagtgccatgctgggttggatcaatagtccattcagtactctgtatttggacagtggccctgggggatactttgggagagcctctggttgtgccatttggatgattctttagctattaggaaggtaaattatataataacccattatggtgcgatcgttcatgaatttttattaaccctgtctgcatctgtaggcaaaaatctcaaaaaagaccctcttaaaggaatattctacaatacaaagctgcttctatgggctctcagaaagccgacaggaaaagacaattatataaaaagcgaccctaaagaaaaagaaaaaaaactatagaaacaaaaagcagatcagcggttgtctagagcttgggggaagggtagggaatgggaattgactgcacagaggcacaaaggagcattgagagggatggaagtgtttgaaactcaccttccaatggctgaattttatgatatgcatagtatgtctcataaagctgttattttttaaaaccctacataaatgctttctccagtcctcacccagaaaacattatctttataaagaaagccagtacaaggtcagaggtgggaatggaaggagactcaaaatcatgtcacatgagaaatgttgtaaggaccctggaaaatagagccaataaaagaggagagaaaaccgggggcaggggcgggggggggcaggtatgtggggaccgggcgcagtggctcacatatgtaatcccagcactttggaaggctgagacaggaggatcccttgagtccaggagtttgaaaccagtctgggcaacatagggagaccccgtctctaaaaaaaagttaaaaaaaaaaaaaaaaagaaagaaagaaaaccaggggcagctagcagtttgtgggaaagggattacaggtgctctgtgtaatgccaaggaagctgaactagacaaaatggatgaaggttggcttgctcctagaggtagagagctgcgcaacactggaagtattcaagcagtggctcaatgccccactgtggagtgttgcagaaggttcttaagccatggatgagggcatggagtacaaaggacttcaaggttcttttccaccctaagagtctatgattatatacacttctataataagttttatgtaggtttgctctttgcatcaaaaaaactgagttaggccaggcgcggtggctcacgcctgtaatcccagtactttgggaagctgaggtggacagatcacgaggtcaggagatcaagaccatcctggccaacatggtgaaaccccatctctactaaaagtacaaaaattagctgggcgtggtggcgcatatctgtaatcccagctacttgggagggtgagttaggagaatcccttgaacctgggaggcggaagttgcggtgagctgagatcacgccactgcactccagcctgggcaacaagagcaaaactccatctaaaaaaaaaaaaatactgagttaaagcaccagactgttgctcctttccttcccaaataacctgtcttagtctgctcagcctcctatgacaaactaccataaactgggtagtttataaacaacagaaatgtattcttcaccatcctgggctgggaagttcgagatcaaagtgctggcagactcggtgtctggtgagggtgcatttcctggtttgtagatggccttcttgctgtgtgctcacgtggcagaaggagtcaatgagctcccttgggtctcttttattagggtactaatgccattcacaagggcttcaccctcatgacctcatcactcacaaaggcctcacctcctgataccgtcaccttgcagttagagtttcacatgtgaatttgggagggtcacacaacatgcaatctataggagagccagacttcgaaattgtatagaaagatcaaggagctaggagggggacatggatgtccttggttgatgctttcttcctttccctagaggttgaggctcagttctttagtatctttgggtctccaaggctttgtgtccttggcccgacattagaagctctccgttctgtaggagcctgagctctctttccagccttacttcaatgctccccactacaggccaggcacagtggctcatacttgtaatcccagtactttgagagaccgagccagaagaatcacttgagctcaggagttcaagaccagcctaagcaatatagtgaaatgctttctctacaaaaaaaactaaaaattagccaggcatgtaggcatgcacctgtagtcccagctacttggggtggctgaggtggggggatcacttgagaccaggaggacgaggacctggccactgtactctagcctgggggacagagtaagactctgtctcaaaacaaaataaaaaaaaccactgcccaatgcaaaccatctgttccaggcaaagtggtaacacagggcctctaaacgccctccacattttccattctgcatccttcctcagatcatacctcctgcaggaaaggccctcctctaacctccacagtggtctaagtcctatgccacccacaagtgcttcctgccactgtgccacaggtgagactggtcctggaggtccactaggagctgttcaccagcaaaggccaaatctggtccgtgggaggctgaggctgcaacaggcccagaggtaaacacagaattggagaccagcggccaggtgtgggggctcatgcctgtaatcccagcattctgggaagctgaggcgggaggattcttgagcccaagtgttcgaggctgcaatgaactatgatcacaccactgttctccagcctgagtgacagagcaagaccctgtctccacaaaaaatttaaaaattagccgtgcttggtggcttatgcctgtactatcaggtactcaggaagctgaggtaaaaggattgctcgagcccaggggtttgaggctatagtgagctataattccaccactgcgtccaattaggtgacaaagtgagactctgtctcaaaaaaaaaaaaaaagaaacaaagaccaggaattcaaaataggtcaaagttgggctaggcatggtggctcatgcctgtaatcccagcactttgggaggcccaggcaggtggatcacctgaggtcagaagttcaagaccagcctgaccaacatggagaaaccccaactctactaaaaatacaaaattagccgggcatggtggcgcatgcctgtagtcccagctactcgggagactaaggcaggagaatcgcttgaacccatgggaggggtgtggagtttgtggtgagccgagatcacaccattgcactccagcctgggcaacaagagcgaaactaagtctcaaaaaataaataaataaataaataaataaataaataaataaataaaataggtcaaagtcaagcaggggatgtttgcccttcgtatgtgattaggggagacaacagacaactgctcaagttggtcttttttctttcgaagttttaatatatatgtacatataaatgttacatatatatgtaatattaagaaagttaaccctgaaacaattaaatgatactatcactatttaatagtttacttacataatcatcatttttctttaagttctagagtatattctactttaattaagagtaaaattaggctgggcttggtggctcatgcctgtaatcccagcactttgggaggccaaggcaggtggatcacctgaggtcaggagtttgagagcagcctggccaacatggtgaaaacttgtctccactaaaaatacaaaaattagccaggagtggtggtgcatgcctgtaatctcagcgacttgggaggctgaggcaggagaatcacttgaacccaggaggcggaggttgcagtgagcggagattgcgtcattgcactttagcctgggcaacaagagcaaaactccatctcaaaaaaaaaaaaaagagtaaaattacagtacattttgctgaaaaatgtaacagtcatcaaaactatttgtttcttagtgttaggcaggcccagagaaggtaattataatttctcagcccaaggattttagaaatcaatttattaagcattcttcagaagggattctcttggtctttgagagtttctagttttaaacttaacaggagagccaagtaaaagttgaaaatgaagagactctaccctgggggttttcaaaattgaaaaggtttatgaaaacattagtttacatctttctaaatcactaatctattgtctccatataaattttacttctttatttaaagacacttattactatacaatggctgttgggtgcaaagaatatatgccataaatacttgataaactgaagtgaatccatgtacaccaacggaacttgttaactctttgcagccttttggtgacacaattggttagtatgtcatatttaacttgattacaatcttagaagacacggtaatattctttggagtagaagactacatcaatttggggtctaattcctgaaaatttcttggtaaatagtacaggataatcagggttcatgaactgccttttctcatctcacctccaatactctttatccacaaagaagtaggtcttgtagttaagtgaattaaaaacggcaccatcaaatcttttcacagagacaaggaagctcggagaatgtatcctcttgtgatagtctggttttaaacaactgattaaccagtactttcatctttaaaaagaagaatttgactcctggatccaattttataagcagcttgaatgccagatgacaagatcagccataaggaagaaattaaactaacactgctctttgatagttcaggaagcttacaccaaaagaacctgtctttaaagaaaaagatttttccttcaattatagtgacagcatcaaagcttaacttggagtcacaggtagcaggttttagagtataaggatgtgacaggggttggtgcttttatgggcttccacggagaaactgaatatcatagatgtcatcagtagagaggcaaaatctggttggatcaacataactctagagagagaaaaatagcttttggatctttggagtggctaagacccaaggaatggccctatcagcagcatcaagaagcaagtttatgcctttggagtgttgaattcagattttagcctcctcataatgcaagtatccatcaacaccagctcccagaccataagcataggcaataggttccacctctgccatcaaaaggattcctgtcttcatgatctccttatgcaaaatatatcttaatgtggcgaggtgcagtggctcacgcctgtaatcccagcactttgggaggccgaggcaggcagatcgcctgaggtcaggagttcgagaccaggctggccaacatggtgaaaccttgtgtctactaaaaatacaaaaaattagccaggcgtggtagtgggtgcctgtgatcccagctactcaggaggctgaggcaggagaatcacttgaacccgggaggtggagattgcagtgagctgagatcacgccactgcactccagcccgggtgacagagtgagactccatctcaccaaaacaaaacaaaacaaaacaaacaaacaaacaaaaaatatacatatatataaaaatgtcagcctcacctgggtcaatctgtttgaatttcgggggtggcaggtaccatatcactccatacttgaaagccttctggatggcatagtcaaaatctttctacaccatgccagtagtataattcttgattgtgtaggtgatatgacatttcatccatactggtttccccatcactgtgttaacctgatgaacattaggtactgctcatcaaggtgcatgcatcattgccagagtagatgcatccaattgcccggtcacatttggccccaaaaactgctatatttcctggattttgtgtgccttgaattctctgttggctctctttgtgatcattggaattctttccttcaggagaccataaaagatgcccatgtacctttgtgcaaacacatcattttgttctggacttgtactattagccacaggaatagctccgaaggcagtggcttgaaggaccagaattaatagaagaaacttcagccgggcgcggtggctcacgcctgtaatcccagcactttgggaggctgaggcgggcggatcatgaggtcaggagattaagaccatcctggctaacacagtgaaaccccatctctactaaaaatacaaaaaaaaaattagctgggcatggtggtgggcacctgtagtcccagctactcaggaggctgaggcaggagaatgatgtgaacccgggagtcagaggttgcagtgagccaagatcgcagcactgcactccagcctgggtgacagagcgagactccgtctcagaaaaaaaaaaaaaaatagaagaaacttcatcttcaaattctcttgaatagtttaacccaatttgctctgttcctttgcagtctccagctggcttttattcctgccttatacatatgcaggtactcccacccccagcctaactgaatgtctctgacaacagctctcagaatgcactcctacctctaaattctttattatttgtacctcccattttaatgataccttatataattacttaacttttcataaaatggtgggatttatcagctataagtaagactcttgaggctacacaggccaaccagagttttcagatttattattgttgttgttgatttgttacctttttaatttcatagactgacatctcccttctacctcccactctcttttgccctgaaacatcaactttaaacccaaaaaaaccttgctttatttatttatttatttttgagatggagtttcactcttgttgcccagactcgagcacaatggcacaatctcggctcagtgcaacctctgcctcccaggttcaagcgattctcctgcctcagcctcccaggtagctgggattacaggtgtctgccaccacacccggctaattttctctctctctctttttttttttttttgtatttttagtagagacggggtttcatcctgttggccagactggtctcgaactcttgacctcaggtgatccacctgcctcagcctcccaaagtactgggactacaggcataagccaccatgcccagcccaaaaaagtgttatcctgtgcattcagatgaaaataaagtcatgaacatggagctactgcttagctggaaggaaaaggaagcaccagtgtatgggatgtgtgtccaccaatgatggcctcagaagtatctcagataagatgcgatttttaaagtggatacactctgtgtatttacatatgcagatctaaaacttttaggcctttctgaactgttgctattgttaagacaaacaagtgctattgtgagggatcagtacgaagtgccttgagtctgtccaacaaaattctgtctcatttaaagcttttcaatatcaaagccacttgataattaagcagaaaaggataatgctgaaatcagggtgttcaggtgtctatatttctagcttttttgtgtctttcttaggatttggtaataagaagtacacacccttctccaggagggaaaataacatcattttaaacaacactacagttatactttcattttatactgaacctgcctataccggaaatggcccagctgtaaaacaggaccaaaacaggctgtctcattgttctgttagaaggcagctgtcctggtgagttacccaccaccccaacactccacagaacaatcggcttatcagagaaggaaaactttgcctatcccagacttcctttcttgctgcttgttttgttttgttttgctttgctctttaagcacagattggtcaaaaccttgtataacactgatatatttagtatactgtaaaagccatggaggtctttgaaatgcacacaagcgtatattatccttgttgggaaaggcaaaagtttgattattgattgttctcttttgcaaaaagatttttttttttgagacagagtctcgctctgttgcccaagctggagtgcagtggcacaatctcagctcactgcaaactctgcctcctgggttcaagcgattctcctgccttagcctcccaagtagctgggattacaggcgcatgccaccacgcctggctaattttgtatttttagtagagatggggtttcaccatgttgaccaggctggtctcgaactcctgacctcagatgatccactggcctcagcctcccaaaatgctgggattacaggtgtgagccactgtccctccggccggcattttttttaacagagcattttcctgtcctccttaccaaaatattcctgatgtcacaaaagttacctgaggctgtgacaagcagtcatctatagacactaattctgggtcgatgactaatctctcagattctgctgctcttccctacccaacctccagctcctaagtgttaccctaagaagaaaaacgaaattttatttctctgggaagataaatttttaaaactgttcccttggaatttatccctatccagaacatgctgacatagaagtgataatagttaaatttagaaagttctttctcaaatcaaagaatactcaagcagagaggaaaaacaaagctcattctagcttgtgacttcattttgcagagaaggaaacagaagtctagggaggtcgagtgtttggccgaagtcacatggaaaatacatttgtttttcttaacaaatagttattgagcatcttccgtgagtccagcactggagttcggcagcaagtgggttcttggcagggatgtgggtggcagagccagggctagaaatcaagctccaccctctcctgctgtccctgtcccaggcctctcccactgcaggacctctggccttgcctcctcaaaggattagcattctgagtgataaaaataagacaattttctggaagatggagcctcatttgtttccagttccttctggcaggaatcgaggggcatttgggagggagccagggacatgaatgtgttcttattcacagatatgatgccactgtctcagagctcacagaatgtgggccttgagtaattttctggagacctctcccatgatcaacagggtggtggaggtagatataaacacaggtgccacaggtcatacacacaagagagctgaccacactttgaggattcctaaatctacttggaaaattcctcatataataaaaatgagccttgttccaaatacttgcatacttgcagcgaagtagtaaagcatgtagaattcttttttttttttttgagacagagtttcactcttgttgcccaggctgaagtgcaatggcacaatctcggctcaccacaacctccacctccgggttgaagcaaatctcctgcctcagcctcttgagtagctgggattacaggtatgcgccaccacaccccgataattttgcacttttagtagagacagggtttctccatgttggttaggctggtctcaaactcctcacctcaggtgatctgcccgcctcagcttcccaaagtgctgggattacaggcgtgagccaccgtgcccagttcagcacgtagaattctaagaatcaaagcagcattcaaaagtgctcttaaatagaaagatatatggctaggctcagtggctcacgcctgtattcccagcattttgggaggccaaggcaggtggatcccttgagttcagaagttcaagaccagcctggccaacatggtgaaacccctgtctctactaaaaatacaaaaaaaattagctgggcttggtggcgggcccataatcccagctactcgggaggctgaggcaggagaagcacttgaatctgggaggcagaggctgcagtgagccaagatcacaagactgcactccagcatgggcaacagagagagactccatctcaaaaaaaaaaaaaaaagatagacatctctccttcaagcaattcaggcctgcatccctctggtcctgagaaaccataagcattccctccagggagagcatgtccttgtcatttcatttcttctgggctctagaatccagagccaaaataaaatcctcagtgccactgagctggtgcctcccaggtgtaaaatcacattttcgtaccaacatacagtccctagttttgggggggattacactcagggattataaccaagactttacctacccctagaactgtgctgaagccaatagagcagcaaacagaacagtcctggaatgtgacatgcaaccagtaactcacttgtttctgaaatatctgtatttattttagcttcatgatttaacaggaatagtgtgaggtaaaatgacatgagtcacttaaagcctttcagaaggagaagtaccagccttgatgtggggaaaaaattggtcatggtggctcacacgtgtaatcctagcactttgggaggccgagatgggcgaatcacaaggtcaggagttcgaaaccagtctggccaacatgatgaaaccctgtctatactaaaaatacaaaaaattagctgggcatggtggcgggcacctgtaatcccagctactcaggaggctgaggcagcagaatcgcttgaacccaggaggtggaagttgcagtgagccaagatcaagccactgcactccaacctgggtgacagagtgagactctgtctcaaaaacaaacaaacaaacaaacatacaaacaggcacaatacacgcacacacacacacacacacacacacacaataaaaattattcctattaaaatcttctgaactaaaataaaatctgacaataagaacctccatggaacactgactcagaatatttcaatgaatgagtattcattttgttaaaaaattcagactggccaggcgtggtggctcgttcctgtaatcccagcactttcggaagcaaacatgggcggatcacttgagatcaggagttcgtgaccggcctggtcaacatgatgaaaccctgtctccactaaaaatacaaaaattagccaggtggggtgggtgtctgtaatccccgctactcaggaggctgaggcaggagaatcggtggaacccaggaggcagaagttgcagagagccaagattgcaccactggactccagcctgggcgacacagcgagactatctcaaaaaaagaaatcagacagaaaagaactaatgagtgttctccatcaagagcttttttctattaaatgtgagctattgtaataggcactcttccaaatattgacaaaggtgctttttctatttcccaaaactttaattaatatgtatgccaaatgagcctctcccttccctaaaaggagccccaaaattatatatagaaatataaatttgtgagaacccggcctgtgagttcactgttggcccacaaaagactgaagctaaaagctccaaagagcttttgagatcaattgttataggaaaacagcaataaaatgaaaaacttgggggctgtatgttggtatgaaaatgtgatttttacatctgagaggtaccagctgggtggcacagaggattttattttggctctggattctagagcccagaataaataaaatgacaaagacatattctccctggaggggatgctcataggttctcagcgccagagggatgcaggcctgaattgctttcagggaggttgtctgtctacttaaaagcatgtaaaaatattgttttcttagaattctatgtgctttgctatcttactaaaagtatttggaataaggctcattttttgtttttgcgggcaggggatttgtctgttttatttttatttttttacaggtggatcttgctctgttgcccaggctggagtgcagcggtgcaatcatagctcactgcagcctcaaactcctgggcttgaaggattctcccatctcagcttctcaagtagctggccccgcttaaccttattttaattttatttatttatttatttatttatttattttctttcactctgtcacccagcccggagtgcagtggtgtgatcacaattcactgcagccttaacctcctgggctcaagcagtcctcccacttcaacctcttgagtagctgggactacagacgtgtgccaccatgtctggcaaattttcaaatttttggtagagacgaggtcttcctatgttgacagggctagtctcaaagccctgggatcaagcaatcctcctgcctcagcctcccaaagtgctaggattacaggtgtgagccacgtcgcctggtcagcctcgtttttataaggagtttttggggcagttaaaaatcctcacagtgtggttctggatcaggatcatccacatcatgtgggagctggttacaaatgcagactctcaggccacgccccacatctgctgagtcagaattcgcatctcagcgggatccctaggaggctcctctgcctctggaggcctggttaggaatgtgcgcttctaagtcccacctcagtgaatcttccctacagtttgagacccttggacctaaaagttttaagttactttaaacatttcatatgaaaatatgatatttcatggctttcctcttttttttttttttttttttttttgagatggagtctcactctgtcgcccaggctggagctcagtagctcagtcttggctcactgaaacctctacctcctgggttcaagccattgttgtgcttcagcttcccaagtagctgggactacaggcgtgtgccaccacgcccagctaatttttgtattttttggtagagaagggtttttgccatattgcccaggctggtcttgacctcctgagctcaagcgatccacccacctcagcctctcaaagtgctgggattacaggagtgagccactgcaccgggccagttcatggcttttctaattcaataggtgaaaaaaaaaaaaaaaaaatatatatatatatgatatttcatatccatagaatttctatgataacaatgattgtgtctagaggagagtactggaggagggaaattttcatgtgttaagtgaaatttatgggactgtcattggcttggactaagctcttgcctgcactaggcccaacagaccagacaaaaccagaatggagtcgctcatgccaggggccatacaatcaaactgaactctcaaacaggctgatattccaaaacacaggaaccaatcacagcaaccaactaaaaggggcccagtttccccatgctggcataataaggaagccccctctgtctgaatccagggaggaaaataactttgaaacaaccaatctgcttttagttccctgcttttgtttttttcagcccttttgtgcctataaagccaacctcctccactcagcttacaggagatcctttctaaatctttggatgggatactttccaattcatgaatagttaataaaaaccaattatatattgaaactaaatttgttgcaattttattttttaacacgttataccttccatactgcttgattatatgtgtgtgtgtgcccatattaatctttaccatggcaaagtaatcatgagccttttctaactaccacacttcaagaggatgttataatttacaaagccctttgatagacatggtttcacacatattctaaacatccttttttgttgagacagagtcttactctttcacccaggctggactgcaatggtgcaatcttggctcactgcaacctctgcctcctagattcaagcaatccttatgcctcagcctccctagtagctggaactacaggcgtgcaccaccacagccagctaatttttttttatttttagtagagataggatttcatcacattggccaggctgctcttgagctcctgacttcaggtgatctgcccaccttgacctcccaaagtgctgggattacaggcatgaaccactgtgcctggcctaaacatccttgagcaaaaagtgatacgttcagatatcccatattacagataaagatgttaagcacagaaataaagaccataaagaaacattgaaaattagaagcctgggcaacataggagaccctgtctctacaaaataaaatatttaaaacaacctagctggatgtggtggtgcatgcctgtagtccctactggggaggctgaggtaggaggatctcttgagcctgggaggttaaggctacagtgagctgtgatcaccccaccgcactccagcctgggtgacagacaagactgtgtctcaaaaagaagaagaagaagaaagaaagaaaggaaagaagaaggaaagaaggcagggagggagagaaaagaaattagagccaaaaataggatccaagtttgttgttgttgtttttgttttgttttgtttttttggagacagagtctcgctgtgtcgcccaggctggagtgcaatggcacaatctcggtttgctgaaaacttcacctccagcgttcaaacgattctcctgtctcagcttcccgagtagctgggattacaagtgtgcaccacgatgtccagctaatttttgtatttttagtagagacggagtttcaccatgttgaccaggcttgtctagaacttctgacctcaagcgatccacctgcctccacctcccaaagtgttgggattacaggtgtgagccaccaaacctggccaggatccaagttttaaaaatttttattatgacaaattctaaatatttataaagtaaatacaatattataatggagacttatgtacctacctgtcactccccatacctcacttgattattttacatatatatttttcaaggtaaaaatttatatacgttagcctgatttagtggctcacgcctgtaatcccaacactttgggaggctgaggtgggcagactgcttgagcccaggagttcaaggccagcctaggcaacatgccaagaccccatctctattaaaaaaagttatatacaataacatgcacaaatcttatcaggatccttttttaaaaacattcccatcttgtttagcaaaaatctggctctattgcctcccaagtgtaaatgctattgccggatttcctgctgtttgctaccctgagttgaatcatccttcccctgcttgaggtttagctgggagaggatgaatgcttttgttctcagtcagaaagcatatgggatgtcaagtctggctgctgcactgttatgcactcacagtgacatccaggtatgcctccttcaaaccatctccctgggccacagtcaagagcctccttccaaaagggaagctcagaatcccttagccatgtcccactccccagacaacctggcagcccccacctgaatgctcactactcttgagtcggctgattgggccatcattaatatatccaactctcatttacttagtcccaatatgtgccagggagttgcctagacttgatctcatctcagagagatccgaacttataaaactctcatttccctttacaagctggaaaacaaaatataaacttgtcttccatctcatggcaggagatgagtcagcagaacaggaaattctccttgcacaagcccttctgatccgtgggttgggtgtgtgtggtatcgagcgagggctgggaagggagccggctcctctcctggaaccactctgaaaggtgaacaatgcgagttggccggtgagttcagaactgttgacacacaccttgtcaattagaagtgtcccaacatgttttggggaaagctgagctgcttccaaataaggaacagggcaaataaggaaactggttgttgccaacgtctaggtggcttcagaatgcaagaggttggaggagttactgcccatgaaactcaagatgcacttgagcggcaagcccagctttggcggatgtttgatgaaagatgaagcttaaggtgggtttcaaggaaggtccttaaatgccacaaaagccctggtaatacaagtatgcacacgcagtgaattgcagaaggaagggagctctaggggttggaaatgtctacacaatgtctaccacttctggcccaatctctaacaaccctgcagtcccctgaagagatccaagctctagtctggtgttattcctaaggagctgaaacttgggataagtcatttaatttccgtagaccctcatttcctcatctgcaaaaagaaggcattaaacacgatgagctcttccacttctgaatcctgtagctgcattgcaaactcaaatcagtttaccatgaccccactttttccttttcttccatgactttgccaatgagatgatgagggagaaatagctgaggctggctgttagatcaagccagactctttaaaataactagtctgtgggaatcaggcattgcaagtgtgtgtgtgtgtgtgtgtgtgtgtgtgtgtgtgtgtacacgtttccattaggtggggcaaggaagcggtttctgcagtgtagagggggaagcattcagtcagctctaaatgtttcagctttgcagaaaattgcatgcagccaagagagaggattcagatttttgcgcaggagaaggaggtgggggaggagtgcatgagctgatattccagctctgaattcaaaaaaggataagaatgcagttagaagagtaggctgagaatgaggcaagaggtaaaaatatgctagggcttttaaatagggtgtagccagagctggttccatcctactcttccactctgcctggctttttacattcagctggccttcccctcaccccacccggacccactctaaactctttcaaggctccgatccccctccacttcccccacgagaaattatataggagccagggaggaagtgacacattttcctgcctgaatggagcaggcccctgaagcagcgtctctcggcctttcagcagttttatctcaccctggccatcgcagccgcctggttcctcgtacaatgcttccctctggctgaaccccactgatgactagaacgcctaaggaggctccgtgctagaggtttgggacatccatacagggctccagtccctctcacatgcaacttccggtcaaacatcaatgattagagctttgttagaccaacgaaccactcagagccctgcccctgcccctcggcatgtgctggattcttggaaggtaaagtaggagaatccccaagttggcaatcctcgatgcctgaatttccatgccagatctctcacttcctagctatgtgaccttgggcaagttacccagcctctctgaacctctgtagtttcatctgaaaggagagattgataataacaactgctttgcaggttctaaggaggatttaataaaagcgtggataagatgtgcctgaagcattggaagtagtggagaagttttgctctgtcacccaggctggagtacaatggcacaatcatggttcactgcagcctcaaactcccaggctcgatcaatcctcccatctcagtctccggagtagctgggaccacaactgcatgccaccacacccagctaatttttgtgttttttgtagagatggagttctgtcacattgtccaggcgggtctcgaactcctggcctcaagtgatctgcctgccaggcctcccaaagtactggaattacaggtgtgaaccaccacgcccagccctttatggcagtttttatcaggaccttcgcacttaattttatgccactgtattgtagttctcttagtggcaccaaaaacgtaaatcagcattccagtctaacaccttattggtagctcccaaaatgaacaactaaagagatactaacagaataacaaaactacctaaaaatgaagactgaagttaaaaacatcatgggcaacaggagcctctagtcctctccagtacccaactgttttgcttggcttttttgagacaaggtctcttatgttgcccaggctagcctctaactcctggtctcaaacaatcctcctgtctcagcctcccaaatagctgggactacaggtgcatgccacagcacccagttcactgctgtttttgccctgcctagtatctctactacataaaatttatcttattgggctggaatgatctgtttccatactgtctcttacaagactagagtctatcctgtccaaaacttggtttatttcatagttcgaaaatgtatactttcttcattttctcttagaatgttaaaatatcattcccccaccccacctccacctctaggactttccctacccgcttttgagggagcatggccctgctaacaccttgatttcagacttccggcctccagaactgcagcagaatgcttctagaaggcagggacatgcctcctttatctttgtatctccagaatttagcctaacaaaatacctagggggtaggtcaacgttggcctcttctgttcactggtgtagtccatgcatgtcgcatggtgctgttacttgtgctgcaacagcactgtgggatttcggggcctcaagctcctcatccgtgtcagagtgtttcactggggtcagtggactgagtgctctaatcctagttctccagtgggtcacggcagaattgggcagatttgaaaagatagattccaggttgcgtgtggtggctcacgcagtgggtagatcacctgaggtgaggagtttgagatcagcctggccagcatggtgtaaccctgtctctactaagaatacaaaaaattagccgggcgtggtggcacgcgcctgtaatcccagctactcaggaggctgaggcaggagaatcgcttgaacccaggaggcggaggttgcagtgagtcgagatcatgccgttgcactccaacctgggcaacaaaagcgaaactctgtctcaaaaaaaaaaaaaagaaagaaaagaaaagatagattcctggactccattcctgaataattcaataggtctggggtagggcctagatgtttgtacttaagcaaaaaaaaaaaaaaaaagaaaggaaaaaagaaaagctttaaagatgattctggaacaggacgaaacttagacctcactgtacgagatgtttccaataattttgcaagtagtatgattatatatgtcattttgactgatttcaaaagactccaggccatcaagagtgtttttctaggctgatatgtgagtatatagagcttaatttaaacaaatggtgcctcgggaggattagtgatcacgcaccctttaaaccgatgaactttttaaatcctgtatttagcagggttacagaaaaattgatttttttttaatcagagaagttcaggagaactgatttttttaatttttatttatttatttttttgagacagagtctcgctgtaccgcccaggttggaatgcaatggcactatcttggctcactgcaacctctacttcccaggctcaagcaatcctcccgtttcagcctcctgagtagctggaattacaggcgtgtaccaccatgcatggctaatttttgcattttttgtagagacggggtttctccacattgcccaggctggtctcaaactcctgagctcaagggatctgcccacctctacctcccaaagtgctggaattatacacgggtgagccaccgctcccagcccaagaactgattttttaaagaaataaatattaatacatattatatacctctttatgttcaaaataaggaatgtattttttatttacattttatttttttgagacagagtctcactctgttgcccaggctggagtgcagtggtgccacctcagctcactgcaaactctgcctcccagattcaagcaattctcctgcctcagcttcccgagtagctgggattacaggcacctgcctccattcccagctaatttttttttttgagacggagtctggctctgtcgcccaggctggagtgcagtggcgcaatcttggctcactgcaagctccgcctcccgggttcacgccattctcctgcctcagcctcctgagtagctgggactacaggcgcccgccactacgcctggctaattttttgtatttttagtagagacggggtttcaccgtgttagccaggatggtcttgatcttctgacctcgtgatccacccgcctcggcctcccaaagtgctgggattacaggcgtgagccactgcgcccggcctaatttttgtatttttaagtagagagagggtttcaaccatgttggccagtctagtctcaaactcttgaccttgagtgatccacctgccttggcctcccaaagtgctgggattacaggcataagccaccacacctggcccaaaataagaaatttattacatatattttttttctgaattgctgaaccagacttcttagaagacaacataatttttaaaaaaatttttgtaattgggcagcctcccaaacgagaattggtttagagagactcctttgtaatttcaaatttaaatgaaagtaaattgttccaaataaagaacacggtgtcatccattattcaggtaactgtcagctagctgccttcaaggcaggacctgaatgaagctgcacctggatcctacatgcatgtgtcacaaaatgctaaagggtggggggtggggggggggcgagcggggaggataggacgcagggttttgtttttattcaagggtaatctctactttggtgataacaagaccaatttagattcacaaattaggtaacaaacctgaattaactcgctggggttgcttgactttattccagtgatggttttgtttgtttgaagacaggctctcactctgtcacccaggctggagtgcagtggcgcgatcacagctcactacaacctcgacctcctaggctcaataaagtctcccacctcagcctcctgagtagctgggactacagacatgctccaccacacccagctaacttttatattttttgtagggtttcactatgttggccaggctggtctgaaactcctgggctcgagcgatccacctgcctcaacctcccagtgctgggattacaggtgtgagccaccgcactcagccccagcaatggtttaacacaccttttagactgatatcccaggtggccactggtctgcctctttgcacctcaagtgctaactagataacaaaaggtcacctctgcaccctcataaatatattttctcactctcccaggtcagtgttttagacacaactgtgcaggctggggaagaagaggtcagggatggaggagggaagtgggtctactttgaactgcatcaaattccctcccaagtgactgagggaggagcccgatggagaagctctagagagtcggcttctcttagctgggggcggccaagggagcgtccaaaatatgtgcacaaaggaccacaaagcctgcaggcagacacaccgccaaagacgtggatgacagccaggcacaacaccggccaagttggaatgggacaaaggaggcgttgtgctcatcggttgaattatcccagcgtgttcatagctattctttgtttttcttttctattttgacgaaaaatgttgcagttttttaccttgtcactgaacaataacaaacttgtgacattttacaacacacaggagatttagtaaacttgtgaccattctagggtgtttctgacacttacagaaacatgtttcggtcttgtggggcagcagggtgttgtgtgtctgcctttctgtgtccccatgctttgtgaatgtcactgtgtggcttctggtgccaacacggcaagataagatcagttacatggctgcaagatccccaaggatggtctctttgatggcagtggagggcatggacttcaatactgctgcccacagggcttcccaagagccccttcctagcaagtcactggcagagcaattgcctaccatcgagttgcaggagaaggctcaggatttaacagtgcactaagttacaaagctttggctgagtgaaagaatgagacatgcacagataccatgctttccgtccctttttaaaggctgaagtgataggatggagatcacagacattttgaaagtggccacagagtttatttctctggaagggccagaagtttgccctgaaggacatccaagcgccttccactttgagatccaaagctgcaaagcacatttccacacgtggcctagaggagatggctccttctgtaacaaggaggacttgaatttagatggaaccatttctgcagggcccgcggatggggatggtataaaagggcacagatttcatgatggtacttgcagactttcttcagagggattcagtccaatcacaagaagatcggggttgaggccaggcatggtggctcacatctgtattcccagcactttaggaggccaaggcaggtggatcacttgaggtcaagagttcaagaccagcctggccgacatgatgaaacaccatctctactaaaaatacaaaaattagctgggtgtggtgttgtgcacctgtagtcccagtttctcaggaggctgagacaggagaatctcttgaaccgagcaggtggaggctgcagtgagccaagatcgcaccaccgcactccagcctgggtgacagaatgagactctgtctcaaaaaaaaaaaaagaagactaggggtgagttaaccttccaggtaaaaccaaagatgattgcaaagtcatcatcaatgtgtaaaccaaaaataaaattctaagcccctcaactaactgaacagactcctctctgccaacggcattcgaaagttaacctgaaacactgcttcaggccataatgggataggctggggtgtcgaacttgcctcataccctgtttcctttcagaattcaggcacagctgaccagcattaacattaacacagagaccttaagaccgacgaaatacactctttatagcattaagataccaacatgaaagagagcaggccgtgaagtaaatcgaaacattttacctcaaaatatatttatttaatatatttagaaatggccctgccaagctgtcttatagggaaaagctgcattctatggagaattcctttccctttctgggtctttttcctggtccatgagaaaattaactgagtctggcaccttttaaagtccaattagagacatttactatccctccgaagcctgctacctggaggcttcatctgcataataagaaccttggtctctacaaccgcttatcttttttttgagacggtgtttcactcttgttgcccagaatggagggcaatggcacaatctcggctcactgcaacctcctgctcccaggttcaagcgattcttctgcctcagcctcccaagtaaccgggattacaggcctgcaccaccatgcttggctaattttatatttttagtagagatggggtttctccacgttggtcaggcaggtctcgaactcctgacctcagttgatctgcccacctcggcctcccaaagagctgagagccaccgtgcccaggcttacaaccccttatcttaacccaggcactcccttctattgattccaaggtctttagataataacttaaccctttcaactaactgtcaatcagaaaatctttgaatccacctatgatccggaagcccccttcctcctgccacctcttcttcctacttcaagttgtcccacctctctggactgaaccgcgaaccaatgtgtatcttacatgtattggttgataacttatgtctccccaaaatgtataaaaccaaaagctgtagcctgaccaccttgagcacgttctccggatctcctggggctgtgtcgcaggccatggtcactcatatttggctcagaataaatctcttcaaatattttacagtttgactcttttcatcaacaaaggtttggagtcacagtatcacttttcttcaaaatcatgtcacccttggccacttaggaaattgttcatgttctcagaagcaactttgcagtggtgtgatcatggctcactgcagcctcgaactcctgggcataaatgagcctcctgccccagccgcccaagcagctaggactacaggtgcaccccatcatgccaagctaatttttgaatttttttttatagtaatgaggtcttgctatgttgctgaggctggtcttaaactcctggactcagcaatttctcccacctcagcctcccaaagtgctgggatgacaggcatgggccaacatgtctggcctggcagtaacttttaagtgaggggaaagaagccctttgtaaataaatagaacacatttcattgcatcttattccagttccctcagctggagtgttgtcaccttaatttatccgattgtattgtcatcctaaatttctagcccagtaataacggtaaggaggatgaaaggcggcagttcctctgcagcagtgacattttttcaaaaccttcattaccctttggccagtctgccatctcgtttttgaggtgtttagttaaggatggaccctggagtcagactatctgggtttgtatctgctgtatctgggtttgtatttgatgtctattagctgagggaccttgtagagttatttaaactctctgtgctgctttcattttcttccaggaaaatgagggtaatagtacctacctcatagggctgttttgaggcacaagtgagaatgtgtgcaaagggtgaaaagatgtgctggcactgttagaaaatgcaagggaggtttttgctgcttgtgttgctgttgtgattcccaattcacctagtgagcaccaggagcaaaaactggccatgccgggccaggcacggtggctcacacctgtaatcccaacactttgggaggccgaggcgggtgggtcccttgaggccaggagttcgagaccagcctggccaacatggtgaatcgccgtctctactaaaaatacaaaaattagccaggcgtgatggtgcatgtctgtaatcccagccacttgggaggctgaggaagaaaaatcacttgaacctgggaggcagagtttgcagtgagccgagactgcaccactgccccccagcctgaacaaccgagcaagactctgtctcaaaagaaaataaaagacaagaaaaaactggccatgctgatgctttacatagcccacctgtgggacaggatggacatattaatcctatttaattagggaacaaagtctaagaaaaatgcaacattttattgcaagtgaacttttaaccaggaggactgattcacagggactaaccttaaagggccagtattctaccagtacaagggtatttgccatcccaaatacattatcttatatggtttttctcgttccagtaaatcagtggttcctaatattttaggtcatggactcctttaaaaaaatctgatgaagccaggcatggtggcttgtacctctagtcctagctacttggaaggctgaggtgggaggattgcttgtgcccaggagttcaagaccagcctgggcaacacagtgagaagtgcaactctcatccatcacaaaaaaaacaaaaaaaaaaagttgatgaaaactatgaactatgtaccctctgctcagaacagtgcatattcacatatgcatagactattttgcatgcaaaagcatgaggttcactgacctcaagttaagatatcactgctatgtacatgggagaagtagaaaaagaaagttatggaatggagcttctttccaaaattctttgaggcacatctccatggtgattgtttcaaatgtcaagttctagggccacacttttataagatgaaccttgggattcaattattttttccattatttttaacttctcttgcagtggttctcagccctagttctatgttagaatcacacatggagattttttaaaaactccaatacccaagccacactctagatcaattaagtgagaatatctggaggatgggaccaaggcataagtaatgtttaaagctccccagatgatttgagtgttcaaccaaggttgagaaacacagctgtactgcctctccttaattaagagaataattcagtggatctgggccttccagccccctacaaatccccatttttctttccatatcttttctgtgtagggtatgccatatttctctttaagctaataactggctttcatctcctgttatttagtatgtcacaaagacgtgtattgttcaactaccacttaagacttcatttaactctgagcttatgatggggagaaaaagaagcagaaggaaaagcacatgctgttcaggattgttaaaccccatccaatctcatgagtatgctttactgaaagagccgaagacagagaggaggtggtggcaaaaataaataaataactaaagatgattttgaagacgtagatgactcaatgaaacctgcatgagcggagaagaccagagacacaaggcagaaacatctaaggagtgaggttcctttcatcgtagaaggtgaagatcgaataggtgggatttgagtaggccccaaatcaattctttttttccggtagagtcataattttagagctagaagataccactgagatacactagtcctctttctttcagtcctctttatccttgccccaaccagctgaggcctcagacagagacatcaccaacctgagaaagcaaccaaggttggtgatgtctctgaggtctcagctgatgggggcagtgataggggctggcatagctaggtctcctgaatttagagtgttctcccaccttccacagtgctaggctgacagaggctcctatggctaagagacactaggtgagcagagaaagctaatagaacatattaataaggtgaccatatatatttttttgtctaaacctagacacttttaagggtaaaggagatgtcttagttcattgggatgctataacaaaataccataagctggccagcttatatgcaatagaaatttatttctcacagttctggatgctgggaagtccaagatcaagcactggccgatgtgccatctggtgagggcctactttcaggcttatagatggcaccctctgtgtccttatatgtgggaaggggctagctagctctcaggggtttctttcataagggcattaatcccatacaagagagctccactctcctgacctaattatctcccaaaggtctcacctcataataccatcattttgaaggttaggatttcagcatatgaagttggttctgggttggggtgcagggaaggggcacaaacatttggaccatagcaggagacaacaggtaaacctggacttatttgtctcaaaaatccatttgctatctttcttcatttttacataatctgtcaccttactgatatttctaccatcaatactacttctgtgaaagagtggctcttagtagctgtacagtgaccttgaactcacctgtgggttcttccaggggcgaattctgagctgtcaatcaaaagaaaagtttcctggttctgactcccgttacttccctctccttttccttgcttccatctggatccaagcattcctatagggtagcaacatggactcttgggagaagggcttcacagacacacttgcagtggtagtaaggtctcagatatgtgtgttctgccccctctccactttcttccttgtggggactttctgcctgtgaaccctccactctgcctgaggtctctctgagctgacttccctctttcccagacaagcagtgttccttcccaggtgagcacaatatttctcctttcctcaatagatttttccttgttgaaaaggcaacgttttgatctctgtgacttttttgcttgttagaagacaggcctgtcctctttccatacagggcccagttcagctcagactggatttagtatccatcaaacgttgatcaccagcaacaatggcacctctagtcagttttccgtaggtgctgttcttaagttcttgtgttaacaatgtactcttctggaaccttctaagaacagagtattatttatttttttttttcttttttcttttttgagccagggtcttgctctgtcacccagactggagtgcagtggtacaatcatggctgactgcagacttgacttctgggctcaagcgatcgtcccacctcagcctctcaagtagctgggactacagatgcacaccaccacacccagctaatttttgtattttttgtatagacgggggtctcactttgttgcccaggttggtctcaaactccagggctcaaatgatctgcttgcctctgcctcccaaagtgctggcattacggctataagccactgcacctggcctgagtagcattttcttaaatgaaaggaatgctgtttccaaatgggctagttaaacatctctcctgtagcacctggtttttccccaaggagtgtaaggtagttacagactccgagatatttggtaagcctttttatgagtcttctgatatgaagtgaattcctgctataaaactcttgagattgtggctttggcgactccatttccaaatcaaaatagggaccaatcgggaacaggattcaattaaggttacacaatccctatgacatatatatatatttcagttatcaatactttcctattcactcaagcgattgttgcttcatcttcagctctcctaacatggcagctgactaaatcatccgagttctttgcggcttacccaccattggcactccttgatctgctgtcactgtaggctcttgtgatatggaagtaccttatgcccatttattcttggatgtctctgtacctgagctacagcactgtctcccgacttcagtggaaatgttactgccttatcacgtggtcttgatgtttattagcttcccgtcccttacacaaggcagtattttcccctggataacttgcttgaggccgtgaaacctgctgtgataaaagaggttacattatggaagtgggaacccgtgtcagagggaaatcttagctttggaaagaactctggcaggaacataggtgggacaccctatagaatcctcatgtgaccttcaaaaagaaatcgtacacttttccttctgcaacttggttgggactgagaacttcgctgtggtggaggaggttagattgtggaggtgggtgcttcaaatagcatttgcaaggtggtgtctcatctaatttcccttgctgaaagcaacttgaagtctaacttttgttatagctttattgtcttccatattaagaggttattacatttaaatttttattgcaaagctaccaatataccatgtcagagaggtttttgcagatctgttaggcataagctggatttgattcgttaagctttcaattttctctaaggccgtgttcaagggtttgtggaagcattcataaccttttttcagggagggtgggggagtctgttctaaagacgagggtacagtaaagtcatactaagacatttggggtcctcatgggtgagtttacatatttcacccccaaggaatttttactttgccagttatggtttatttttaaaatgtgtttgaggacacatcttctggatcagagtacagtacaaagataaacggtatggaataagcagcttggtgggataatgtaagaagcattagattgagtggattgagagccaaagactggctcccagctcccagcctctcctccatctagctgaatgaactgcatgcaagctaccagcctttaataacaaatgccttaatctcttaaaacccccatttcctcatttctcttatgaaagtctttgagatcatgcacatgacaaacaaagttaatatactggccgaatgcagagtattattcttgattttgttataataatataatatttgaaacctgaattatggtaaaaatggaagtgggcagggctttggctcactccaaaatttggaaggcgaactgaggaagatctgcattgacatcccttttccccatatgtccaggggcttccagtgctcaaggcagcctcagtcaatgttggaccaggcttggtattcacaagtgctgtggttgagataggcctttgtgaagtgtacgccgatatcaaaggctaattcccagatggttaagtggccactgaatttttgttgctctgagggggtctagaagcaacatgggctgaacttggatatgatggaacaggatgcagtaaaccatattaaagaactcataggttcttgagtttatcagacgcaatagctagtgaaaactgatttagaaggtcagcagaggcacatcatagaatctagtatttaggattgaatgccccatagctaagactgtgtgtacataaggtactggggctcatggaagtattgtttcatcagtgttgtcaatgagtccagtggaataatgaaggacagtgcagaatctcgtcgtggggcactggaacagctatcagcactgaagaatcgcccatgacttgtcacagaatgccctgagctagacattagagaataacggcaagatacaataaacctaatgtaatggatgtccaaaatgaggtcaaagcacagaagcaatagttgaagtaagtcccaaagtgcattatcaagcattggggcagagctgtgggcagacttctgggggaaatatgggagcaaacactagctggcagtacagttagaaatgcaaggaatagcctgtagcatatccaaatagatctttattgcaactcaaaagcaacctttatttgaaatcatagatttgttttgatgtcggttggttggtcttcattcaagagtacacatattctaacatcactatttcaccatctcaataggaaagattcacaaccaatgtacaggcatatttcaggaacatcctaaaattgaaattttaaaataaaacggttagagttatcacggaaaggaaggtcatcgtatgtggaacatgtcaatgaaaggaaatgctttagggtaaaaatacactgattagagaggaaggctgatataactgtgggcagagatttatgtatgtggaagtcaatgaatccacaggcggtagtgtgctggtaaatgtttgataaccagctttctgggagtgtgggggagccccagtttctagcatttattgatttctgaggtataaatattccctctgtaaccaatttctaccatacagatataatagatgtgaataaccccaagagcatagataatagtaaaacatagtaaaataattaggaagtgatgagttttgaatatttattacctttgtttataatataacttaattatgtttatataatttaatttttattattgtctgtttttaacaagctcacaaaattcccaaaaatttcacaatcatctctttcgagctagtatgaactagctccagcacacccctgcctgtgagtgaaaggacatcggagcatctttagggaaagatgaaaagaaaaagggaccaggcgcggtggctcacgcctgtaatcccaacactttaggaggccaaggcgggtggatcgcttgagttcaggagttcaagaccatcctgggcaacatggtgaaaacctagctctaccaaaaatacaaaaaaaattagccaggcatggtggtgctggcttgtggtcccagctacccgggaggctgaggtgggaggacaggttgagcctcggaggcagaggtggcagtgagctgatatcgcagcactgcactccagcctgggtgacagagtgagattctgtctcaaaaagaaaaaaaaagagagagagaaaggaatagctgtgaaagatttcgttacttacaaggaaaaaatagagaaaggtgggtttagattattcttcatataagttaatgcataactgtagaatgattttacttaaataatgctcattaatgatcaacttcttttgccccacaggcatgggaaatgcttcatactatagctcatctgctgcagatttggcacgtacattaaaaaatcatataatgaagaatcttttatgcctagtgttgcccaacttttttgactgtaaaacctcttattccccacagaatacttaatatctatggcagatcagtcaagaaactactcagtaggttggttgtaagtatcctgtccttcaaccttcatgattaatgacttcagacaagttatagtgtgttgatcaaatcttttgtaccataggagatagactaagtcagtgattctcaaatttgactacacatcagattcctctggaggcttcttaaaagacctaatgaatcagaatcttcggagttggggcccaagaagatctctctttaaaaaattcttcccattactcagcagtgaatataaaataaaatatttttaaaaaattcttcccatcagacaagggtactactacccataacatttttggcaatatttttttccaataatttgtcaatgtgctctgaaagagtgcaaattgattgattgatcaattgagacagagtctttctctgtagtctaggctggagtgcagaaatgcaatcacagcttactacagtctttacctccctggctcaaactatccttccatcccagcttcccaagtagctgggactacaggcacatgccaccatattcatttttaaaaatttttgtagagatgaggtctccctatattgtcctggtcggtcttgaattcctgggctcaagagatcctcctgcatctgcttcccaagttgctgagattacaggcatgtgccaccacacctgactgagtgtagttttgagcatgcagtgagacggatactacattgtgaattcaggagactttaaatataacaacttatcaatattttaagattatatatttgaaatcctctttttttaaataataattttttttttttttgagatggactcttgctctgtcacccaggctggagtgtagtggtgcgatctcagctcactgcaagctccacctcctgagttcatgccattctcttgcctcagcctctccagtagctggaactacaggcgcctgccatcacacctggctaatttttttgtatttttagtagagatggggtttcaccatgttggccaggacggtctcgatctcctgacctggtgatccacccgcctcggcctcccaaagtgctgagattacagctgtaagccaccgcacccggccttaaataataatttttaaaattttatcataaagacaggggtctcactatattgtccaaactggtcttgaactcctgggctcaagtgatcctcctgcctcggcctcctaaagggctacaattacaggcatgagccaccatgcccggccagaaatcctctctcaaaaaacattttggcactaaattttaaactgaagtcattaattctctagaaagaattacaattacatggctttttagatattctgtacaaattgtttatattgaataataataaaatctcaatgatgaaggaaataatacagaataacaaaactttatatgtgtttgttcaagtatttaccaagttcctactatgttctagggactatgtatcaataaaaaaaatgacctattgggaaaaagattagagagagatgtgtgttaacagctgtgcatgggaaaaggctcgatcacaatataaggaggtgcagtctgtgtgattgtcaaatccaaggaagtccggtttgtagaaaagaacaggtaacagtttcactcaggtgtataatcgtcaggcctgaattattatatttagttctgggcatcactatttgaggcatttggaacaagtacactatatgtagagggtacgcccaagatgagatgcagagattaaagatgggcagatgaagaagcttggaagaagctcattgattattgtagagaagagaaaacttgtgagatgtagttatgttccaagatctaaatgaccttcattgaagagggctcagatgggacagccagggtctgctgtttaaagttgcaatgaacattcataccatgatattcaaggtattcatttctgtacaatgtacagtgtaaggccgaattacttcgtgatcatagctctctaaaaacagaatgcgtcttagttctcagctacttgcaaattttaagccaaggctgaatgagcactgaaggacatgttacataaggaatttaagtatccattatgagaactgggttagttaatgcctgaacttcctcccaaccttaagcttgtgtgtttctgtcatacatgcataaaacacacacttgtgtcatggctaataacctcaaatgccacctaaaaaatctgcagcatgggcctggtgtggtggctcatgcctgtaattccagcactttgggatccaggtggattgcataagctcaggagtttgagtccagtctgggcaacatggcaaaacccaacatttatgaaaaatacaaaaattagctgggcgtggtagtgcacacctttggtcccagctacttgggaggcttagcagaaggatctcttgagcttccttggaagctcaaggctgcagtgagccatggaaggtcaaggctgcagtgagccatgattgtgtcactgcactccagcctgggggacacagtgagatcctgtctcaacaacaacaaaaaatctgcagcatggacatacactcattcttcaaacaaataggctgtaatgtaatagtttacattacaggacatttatgatcgttcaatatgcaacactgaaaatacattttagagataatgtttaatttcacaaagtttgcattttataccagatattcaggttatatccttacaggatgtacctgccacaaaagtataatacaacattttcggttgcaatttacaaacagaaggtaattgcatgaacttactaatgtttccttcgttaaatgacactgtcgcaatgtacattgcaatgtaatcatgaagtaattctgccttacattatacattgcacggaaatgaataccttgaatgtcatggtatgaatgttcattgcaacactgaacactgttaaaagacaaagacaaaatgtttctctattttatgctaaaaccatggattaagtcacatctgtgcatacagttataacggactacaactttcactttaaggtagaaaataggtagcatagatgttatcaagctctaataccagcattagaatgaattttcataattaagtttattctttccctttaatatatgttaattatagaatatttagagaaacgcaagtgtcaaaggagaaaaaattacccatcgtgtcactgtccagagacattactgagaacaccttggtgcatttccttcctgtctctttcagctgtgcatatattgtgtttgtttgttgtacatacttgcgttcatattgtatctatattttttatcctgcttctaaggcacaagcaatgtgccttacaaacatttgactactacatagtaatccacctggtagattcactatcatttttgggtttatccttctagtgtaagatatcttagttattttatagtcagttctataccttgaatatcatggtatgaattgtctttattgtgtagactctgcagagttttgggaaactgacttataggccaaatgtgtagctattaaaaaagtaggctgagaacggtggctcatgcctgtagttccagcactttgggaggctgaggctggtggatcacttgaggccagaagttcgagaccagcctggccaacatggtgaaatccatctctactaaaaacacaaaaattagccaggtgtggtggcacatgcctgtaatccccgctactcaggaggctgaggcaggagaatcgcttgaaccccagagatggaggttacagtgagccaagattgcgccgctgcactgggcaacagagtgaaactccatctcgaaaaaaaaaagtatataaaaaactgacaagtccttataactttccctgtaaagcccttgcaattgcttcaggtcagaaggcatagctatggtgggtttgtcaaaattctaaactgtaaccatttttaatcagggacctctccccttactcttgaattcatggactttcctggataccccttggtctaaccacctagaggagaaaagcagctgaaaagtgccacttctcatttagtgtgtgggggtggggtgggggcgtgggttgtgttcctctcaactccaaacatgcttcatcgaggaaaagagtaactttcaaatgtttcttctttggtcattcagtatactttaaaaagccatcttgcagtaacccatggctaaatcctgttggctccatcctgctggtgagattgtgagtgtctttagtacctttcagctcagacccaaagcagaacacttccaagacaaacaggctgtctacaacctcaccaggaaactccagagggagttgtctccctgtttgtgcctaagctgaactcagttctgcaggaaactatgagtttgtgtatcttatatgtggccaggtgttgaagttctggctaaaggctcacattaaagaaaacttggatgatagcatctggatgagggaatggtgtcctacgggatcctcttggataatatgtattcaggagacaaaggaccaggtggaagtagctgggatgaatctatctataagcaacttacatatttaaacaactgttgcctgacaaatgtagatcagaatgactgagatcattgtaaaacgtctttcttccacagttaagggtgagtgacaacatttatgatatggcaagcattgaggagtcaacatttcagtggttttctttaagccagagagatttattcattcatgcattaatcccacaaattatgtggctgatgatatggcaatgaatggcatacttcctaccctcaaagaactcagtgtagtaacagacaaatatttagataatttgagtgtggtctagaaagacagaagtgaactggattttacaagaatattgagtaagggtgcccagcccagcttaaggtgggtaggaaatggggaacaatgtcagagaagccttcctggaggaagttaacattggaattgttttttaaagaacagtagttttactggctgaggaggaagaaggacggctgctgggagtgttggggtgggggtggcggggtgcgtgggagtgttgggctgggggtggcggggtgtgtgggagtgctggggtgggggtggcggggtgtgtgggagtgttgggggtggggttggcagggtgtgtgggagtgctggggtgggggtggcggggtgagtggatggtagtgctcaggaaagggacagcatcaaccatggtatggaggggatgtggaatcaagacttgtgcctggcagcactatgtttgaaatgctaaatgggcatctagaaatgtcacataggcatgcagaggtgtgtgtctacagttccagggtgagggcatagctggagatctaaatttagcagtccctggtatatacatggtattacatgatatttacttaagactaaatgaggttgctcgaagaatgtgtagttacacaagggaccccagtacggaggctggggagacagatcaccgtaatatttatttatttatttagagacaagatcttgttctgccacccaggctggagtgcagtggtgtgatgatggctcactgcagcctcgacctcctgggctcaggtaacccaggtagctgggactacagtcacgtgccaccacacctgactaatttttttgtatttttttgtagagacaaggtctccttttgttgccctggctagtctcaaaatcctgggctcaagtgatcctcccaactcagattcccaaagtgttgggattacaggtgtgagctactactcctggccaccactctaatatttagagggtagtctaggagaaggagccagcaaaagaaactacaaggaatggctagacaggtggataggttagggggggtgacaaataaagtgtcaaggggaaaaaaagagtctcaaaaaagagggattgatggatggtttcaaatgctgctgggaaatacagaaaaattaaaacagagaagtgaccactgtagcaacatacagatcattaatgaccttgacagaggctatttaagtgcagtggtaagggcagaggacagagtggaaggtagagccacgtgtggaagcacatgcctatagtcccagctactagggagacagaggcaggaggatcacttgagcccaggagtttgaggctgcagtgagatatgatcatgccactgcactccagcctgggtgacagagctagactctgtctttaaaagaaaaaaaagttttgtttttttttgtttttgagagggagttttgctttttgtcgcccaggctggagtgcaatggcttgatatcggctcaccacaatctccgcctccctggttcaagcgattctcctgcctcagcctcccgagtagctgggattacaggcacgcaccaccacacaaggctatttttcttgtatttttagtagagatggagtttctccatgttggtcaggctggtcttgaactcccaacctcagctgatccacctgccttggcctcccaaagtattgggattacaggcgtgagccaccgtgcctggcaaaaatgtttttttaagtggaagatagatatggaagtgagatggacaagagcaacccttgactctgggctagcgggtgttctggcctctcctcctaatggccattctgatgaaagggaggtggcttatggtcctctgaaagggctgaccagggcccaaaaagagccaggtcgtttacaccagggtgccagggtgcactggcccttgattatcagacccaagtcagcccattccacaggcatgcagtacccccaaggctccaaataatgttcttaaaacagcacctggcacaaagtcggtgctatatacatttttgttataattatcccagtttctaggcaagctttattggcttctaagaacaaatcatttatgtaaaccaaatcattttcagggtatgtaaagtctatattctctttttctgtcttcctttctctctctctccttccttctgggttctggttaagatggagagctctccctggagagtctgggattgaaccaccaaagaagggcagagcaagcaaaaaggaaaataaatgaaggcatacccagagaaatacatttatgaaaaacaccagcattgaagaaaatacagcacgcagtgcactgaagttttgtacctgttgtacaggtagccaaaagatgacacatagagggtggatttttagttttgattaattcattggtaacgtgggaaatattcatgcagaaacagaggaatgatcatgcagtggtgcagttgttcctttgaaggaattttgaacgttgcattacagttcaactgtcctggaaatcaaaaatatggtagaaagtggagatggtggggaggacgtgtaaatatctttaactcccccttcttggtttccaaacgcctttatcactccattcagccttaggccaaattctggatgcttttacaggtgtttttcacgtgtaaaatgtgcatatctatctcctaggagtatcgtggagatggaatgggatatgtaaagtgtgctgtatatagcaactgcatcattagagcatctttcaacagaagtgcacatcccctcatagctgatgactggcatttcctgttcatttttttccttctacctcttaaccttactgacgatgctttcaatacaaatctaataataacggcagctaacatttatcatgtgctcaaattaagtcatttcatctccccaacaatcctatcaggtaggactgtcatcttcatctcctgagccttggaatcatattaggcagcctggcttcagagcccagcactttttgtgtttttgtttttgttttgacaggatcgcattctgtctcccaggctggagtgcagtgatgtgatcacatagctcactgcagccttgacctactgggctcaagcagtcctcctactgcagccttctagtagctgggactataggcacgccatcatacctggctaatttaaaaaaaaaaattttttttggagagatgggtctccctatgttctccaggccgaactcggaactcctggcctcaagcgatcctcccacctcggcttcccaaagtgctgggactacaggcgtgagccaccgcgcccggccctgagcccagctcttaagcacgcagtccaacacgtttagctggagagacgccgggtcacttcttgggccataccctctcatcacaaactcaggtttctcttagaaatcactcttagtgtccgcagtgcctaggactcccgccttggatcctggggcccacgagaaggtaatttaattcacccagatagaaccagcccaatcgtgtccctctgaaccccgtgaactttcaccccggctgagcagtaagtctgcaccgctgtccctttctttgtggtctcagggctaatccaaagtgacaatttcctaagaagcagtacggggttttttgtttgtttgttttttgtttttgagacggagtcttgctctgtcacccaggctggagtgcagtggtgcgatctcggctcactgcaacctctgcctcccgggttcaagcaattctcacacctcagcctcccaagtagctaggattacaggcgcacaccaccacgcctggctaatttttgtatatttttaagtagagacggggtttcaccatgttggccaggctggtctcgaactcctgaccttgtgatccgcccgcctcagcctcccaaagtgctgggattacaggcatgagccaccgtgcccggcccaggtattcctagaagacataggaccccatgaatccttgcaggagagcacgtaaactggactcctaagcccgccccagagccccggcgctagtgctcgaggctgggacactgctaggtgcacacagccgcggcctggcgcaggcggtgcggacagagggtatgccatggcgagacgctggcgcggcgcaggccctgccggccgggacacggagggcggggcacaggcgcagcaggaagggggcgtggccaagagccgcccggccgctcccccgcccctccccctccgctctccgccccagcccggcggctccgccccctaggtgacgtcactggccaggccagccggcgccattttgaaagtggagtcgcctgcccctgccgctgccgccgccgccgtcgctgtcgtagtcgccgccgccgctgccggagaaagagcacgagcggggaagccccagagtgaaatctagcatcctgccggctggtctgcccgcccctccttccttttccccccggcccccgtcccctccccccgcaggtgccatccgccgccatccgccctctctacccccccatccccaggtgaggggggtgagttcaggaagcggagaccccgaggaacccagcagggtcaccatttgcagcgcaacatggcaggtaaaggagaaatccccctcgccccctgacaaggcaccgcttccttattcctccctccatcaccccctagcgaccgcccgcgcctcgcgcagagccacagggcgcccctcgggtttgagggagtagggtccagaggggtggggtgggggcggggagggctcccgggaggcaagtggtcacggtgagagtcactgggcttggagaacggggctggcgccgtggcgggggtgggggtggggtgtgccggcgagcttggggtgaggcgtgggtggggcggggtgggggtgcgtgcagatttgtccctcccgctcgggagcctggtggatcttctcccacctccccaccttgccccccgcctttatttttttttcctgcaggtcttcatttaatttctatttttccccctgctgcaagccttcttgggtgtatatacacatttattttgcctcgagaaggaagagcgccttataagttaaaatacagtgggggcatatgtgtattttttccccactgtagatgccaatatttttgagactggaagcctaaattttttgtttcgaaccatttcgtttccgtttcttcccttttaccgccgaagagtgcaaggcctttcatgtacagcaagttgcatgaaaataatttaaactttgcgtttagcatgttagcttttttgcagatgtccttttcccaaaagggtttggtagagttagttaaaatagttgcggagttcagagatataaatagcaaggaggagagagatttaggtagaagctttgaaggggaggggaaaggatgtagagagaaaaccagtttggaaataaatttagcaaggaataggggtgatgggggagagagaagtaatgtaattgctttgagaattctttttgtacatgttggtattgctaaatcttttccttcatgtagtagaatcagttgcagatttagattcagtttctttctccctagagccccaggacattttcaatcatttcgacctcagtacttgcacgtgaaatagaaacattccgagatgagaccagttttccgtgctgtattcattatttagataattaaaccttttgaaaaagttaacatgtcggattgacttacggtttgctataaacaagttgcttgttggccttgttgaaaaatgaaatgagattaaaattgttttgcacgagatgacattagcaaaatgaattctttgccaggtcctttggagtcaagggatgaggtgaagggaggcagaacaagcttcctttgacagtctctttagcagcattcatttcggtttcttttcctctctgtctggagccagtgatttgctggtaatgaatgcaaagaaatgggtgtagtgtttgctgtgtgtgcactttggtgataaggttcatatgaatcattactccttacccaggcagtaatgttcccgaagttttctcttcgttctatgtttcatggtagtttaaccttattaactcttctgcaggctttttgtacacttaagaaaactctttaactcttggtatttactttttttctggtaggtcttgcctgaatgtaaggcttttactgtatttgacaggaagtttgtgaacagatgtttaatgaccacagaacatgtgcctttaaatatttcgtacctggaatcttttttttctttctaatgcagtaccaagtattggggactaacctctttccaaactggtgctcttggtggtagttgtatgtgtgggcagaactaggctgttagtatcatgccaaccatggataccatctttgtgtttacgagagtcaacataagcagaactcggttttaattggtatgttttctttttccaggagctggaggagggaatgatattcagtggtgtttttctcaggtgaaaggagcagtagatgatgatgtagcagaaggtaagaaagcgtttaatgcaaaatttggatatataatttttgcagaaatgtttcctactggaggatttccttgaagccgagactgctataaattcaagatgattttgttgtccaagaaatgtaagaacagttttaaaagatacctttctgaaaaacagccttaaatttcatttgttatttacgccttgtttttattattttttcctctgaatttacatggaaggagcggtagatgatgagacatataagatcctcacatgaaagctctgagctccatataagggtttctttgttatgtaaattccacatacaaataaatggtgatgcatttttatgtttgtacattggttttagataagtaaattgaaataggtgccatcaacatttggctcagaaacattcttaacggcatctttgatttttatgggaagattttttaactacttttgaatttgtccactttgggagtgtgatgctgcttggcatattctgtgaagagatgatagctcagattattcattttgttgtctttctggtatttaggtggataagacagtaacaatgctatgcatatatcgcttgtcttttaggaatcgtatattcttgtgcaggtagaaactgtgtttgatcagttgaagtacttacgtctaattttctccccaaatttattttctaacgtgtttcagaagtttaagttttgaaacttcaaggttttgcattcatttgagatggtcttaggcagcggaggcattttccacaaagttgttgcattgtttcattcctgagaaatgttgaagtttgagttttaatggtattgtgtgtcttgaattacagtaggaattttccaaacaaaactcagataaatttaaacatgtacttgtgagttttaaaaatttggtgaaaattcataaaccttttttccctagattgtgttgtcctcatatttctgacctgtctgtagggtactgtttgttctggagattttttttcaggtggtgggtggtagccgaactctcttatttgcttgtgtcagtgtcatccttaattgtctgttttagagtgtggtgaatcctatggcaagccaactggtgtagattatacttgtcatattttgcagagctctctcacgttccttttctattggatcctcatctgtttcttagatgagaaaccagaaacaaaagagactgactgatggtcatgcacatagtgtaaatcaaggttttctgatgaagtcagtggtgtttgacttgttcagagaagtaagtcctgacttcaagggaggagttgtgtattactcatgttgtaactacattacctgttgaatagtaaacactccagtattggatcattagttctgtgcagttgtgtaatactcaccaagttatgaaagtgctgtatacttggaaaatgttctttggttgaattccatttattcccttaggaaagttcccctaaatgctgagcactgagggtacttggtgtctggaacataaactctgcccacaaggagctcatagtttgcttgttaaacattacgcagaaagatcacatggcttttatttaatcagaagaaattgatagttcaaagtgaacatcatttacctacctgaaccaaataacttgtgatatacattaagtcctcccttaatgtataggttctgtcaataatgtaatgtcaataggttctgtgactttaagcaaagaaagcaacttataacaaaaccattttttatccataccataacaaaagatgctgagcagaaaacaaagtcaaagttttcaagaacctattgacgtgaagttaggagataaatcagttatagttcccctttgctgatacttagtagctgcatttttctactgattggttaaataattttctttagaggttgttaaatattttaacgtaagcatattcttagcatcgtaaaatgctgatacttggtatatacattttagtaagataacatatcttagtaaaaatatgactagttctaataggtattgctgtacaaatgtattaagtataaaaataatccagttttcaaatgacactgctttaatttggatatttctgcatactagagtttgcatattatagtcttgcttatttgactaaggggagatttgcttttctgaagtaaaataaggttattaacacattccccacccccctacctttagactgatctcttcaacaggttacatgtagctcaacttttacttgcctgttttctgttaatgatacattttgattgtctccatattgcctgcctttctcccgtctacatgcagtcagctgccagggcataccatttttactctgtaatgccttaatcttctttgcatacctgctttcacctctattcaggtttgcactctccctcatccagattgcagtaagttcctaaattattccctgcttcttcgtcctgttttgcttcaaagttaatcttaaatgcagtcccagttttgtcattttcctcataagtctacaagtggatcactgtatccactggattaggaattaagttcaaacatctcagtctagaatgtatgacctttgcccaatatggcctctgctctcagtttatttgctgctatggctaatgacccagctaaacagatactgttcttaaaaggcgttctatgctctctcactttagggtctttgtttttgctgcttccaccttggaatgcctgacaatcatcccacagttctcttaccaggatcctgctcatctctcaagtcacgcctttaacctttttgctaatttcctcttttggaaataacctatttttaaagtcttcctttatagcactttgttacgtagatatcatatggtaccccacatctctactgttacatactacagagtttagtgtaggactgatttatcttcgtaccttatgcaggcatgaagctgctctgtctagaacagtgcctggcacacagtagttgaatatttgtttgaatgaaggaacgtaaatgttattgttcttaggttttgaaaggggaagagaaatggtaaaaggcaggatgattgagatgtagttctagcagtcatggatttatttacttggtaggctttttaaaataaaaatttaaaacgctttctgcagaatcatcggtaggctttttataaccagattgatgttatacaaccgtataatgcaaagaaatcaggagaccttgggtttttaccctagctccagcacaaactagtgtatgtcactggggataagtactctcctgggttcctgtgtgtttagcaatggaataacaagagtggattaggtgatttctgctcttccttgtactttaatcttgttaatttccaaaggcatgtaaaaacagcccaaattcttttggtgtgtgtgtgtgtgtgagacagagtctcactctgttaggctggagtgcagtggcacgatctcgactcactgcatcctcagcctcccgggttcaagtgattctcctgcctcagcctcttgagaagctgggactacaggtgcaccccgccatgtccggctcatttttgtatttttattagagatggttttgccatgttggccaggcttgttttgaactcctgacctcaagtgatccacctgcctcggcctcccaaagtgctgagattacaggtgtgagccaccggccacaaaattattactactggtaattaatactactggtaagctagattgtttgagataccgtactctctagaggccttaaataaaaaataaattattgctagtaatatattttacatttttaatttttcttttattgaaaactgtctgtcatgagacagtaggttaagagcacagactcaggtgctaggctacatggtttgaatcttgctcagtcatttatcatttctgtggtcatctctttgtgcctagctcccctctataaaatgaggataacaataaaacctgtcttacagtgttgttttgatgattaaatgagtttatacacataaaacagaacagtacccagcagaaaagagccttatgaggatttagatattattacttgaaccttcatattattgttactttgaaggaagagtctttggagtatgagtatattgaggatttgtctttaaagcctactaaaaatttctcaaagtgaaggaaatagcatatatgtgtgttatacatactctttgattccactagtaaattacaaaatacattcaaaattaagctataggtttagaggcacatatgcagctggtaaaactatgaagaaaagctatgaagtaaaaggaaaaaaacatactgtaaaaagtactataaaagtcagtatagtggctacccttaagctgttggaaaggagttgtgatcgggaagggctggggaggcccttgtgggctatcttgactgggatggtggttgtacagatgtttgtaaagagtaacctggacatttttgtttcaatttttggttttctttatctgttacattttacagtaagaagtttttggaaatctaataatgtattaaagggtttaggatgaaaaatggcagtcccctacctccccactccttaatccctagtccatctcctaagagcagttgttcaactcttccgctgggttccttggtgcttcatttcctttttgggaataaaatggtatttctatatcttgtcaattttagtatttccagctgacttgctcctctagtagatgataactaagctattcacattatcacccccatttctgtccccattgtgccccgatgttacatcacacactatgattaaattggacgtcagtgcttaaattgttatgaccacgcacacattctctgctgaaccagtagtgctctgcagtgtttatttcatcctcaaggtaatacagtaattgcttgtttgttaatttgactatttggttttttaaaaaacgtaatcaatctggaacattacagaaagtatgtggaatagtataatgaacccctgtcacccggcgttgtcaatggccagtgttgccccatgtatggttccatcactggaccctttcccatccttttgttatttaataatgtaatacttgtttttaaaatctgaatttaacaaaatagaaagccaagttcatttcttaaagtcgaacagtaagaaattttttctaatgattttgataatgtgtttaaattttacttgtggaaataaattattaaaaattcaaatacatgtggataatctgaagtgtgtaataattggtcaaaataatagaacaggccaggtgcagtggctcacgcctgtaatcccagcactttgggaggccaggcgagaggatctcttgaatccaggagtctgagaccagcctggacaacatagtgagaccttttctctacaaaaattaaaaatattagcagggcatggcagtgtgcaactgtagtcccagctactaaggaggctgagacttgagcctgagaggtctgctacagttaggctgtgattgtgccactggtctccagcctggacaatagagtaagactctgtttcaaaaaaaaaaaaggaacaacttaaccattcaagatagttattttaattattttaatgtagatttttcattgtttagtaatcttaaaatatcagatgttattaaatatttaataatgaacctcatctgcatatttgatagtcttaaactttcacaggaaattattttaggatattatcttataaagtcttattttatgaaacttggatccaagtacattgtgtgttttcaactctttgctttctgtttacttttggtaggatttagccttgtggactgggtcttgaaaaaatattttttaaatggtagaggctaaaatatgccccaaataaggacataagtaaaaatttgaaaaacagtccatattatgatatctcacacaatttaatggttttagtccattccatatgtttaatgctataatgtaaacaatttaaaatcatttctcttctgcatctcttttttttttttttgttagagacaaggtcttgctgtgttgcccaggccgtcttctgtgtttcttagagtagtatgcatgttagatttaggcagtaaggtaagttagtagaaaaagtagaaccctgttgttttgtggatttaaaaatagtggcacattagctgtattccgaaacctaatgacctatggtaaaggtcttatttaatatccttaccttgtatgacatgtgacacttctttttcttaacactagcattactactgaagtctagtagacctcactcagtacagtcacttaaagtagtagtgtaagtttacccattaaataccatgaatgatagtatctgtttagcatcaaatagttttcttgctttgttttaaaatactaagttttttcacattcatttgacaaaaaattatgagagagaatggccattgaaaacatattgctgacattttgtcatgttattaaaataaaacaaaaattagccttaggtgtttcttagtactctgtaatagtgaacaaaatattaaaatcaagttcttgaaaattgtggaataagcagaatgatgagaggttgaagcaaaaatgtattaaatcagtgaagaggttacagtatgttacgtatttgcatataagtgtttgcctagtttatcttaaagttgattgtaggaagaaaggtacgtttcttaatgctgttaaataggaaaactgaaggattggaaatagctaaaaaattttagttaatatcctcaactgtaatctcgttgccctttaaggtgatgatggaatttgtaattaagtaatcaagtatccataaggtgcttcctcagcagacagaaagaaaagtaaaagctggcggggcgcggtggctcacgcctgtaatcccagcactttgggagacggaggcaggcagatcacgaggtcaggagtttgagaccagcctggccaatatggtgaaacactgtctctactaaaaatacaaaaattagccgggtgtggtggtgcgcgcctgttgtcccagctactcaggctgaggcagaagaattgcttgaacctgggaggtggaggttgcagtgagccgagatcgtgccactgcactccagcctgggcaacagagcaagactccatctcaaaaaagaaaagaaaagaaaaagcctaggtgcaaattagattttctataaataaactgctatatagtcattgtaaggaaggcatggcatggccatcttgagtacctacattttttgagtgcttaactatgtatcaggcattgttttaggtcctttacatctatttatttactgttcttcacaaataccctgtgaaataagtagatactggtgggaaagttaattaactgtataatcttgagcaggtggtgaagctgggattcttaccttagacctttcacttttcctaatataattttatttcaaaacttaatctccttttagttcaggtgaaggcgtttgatgttgaactgcaactcctgtttataacaaggtttatttgtaatgcctagtagatactttttattttgaagtaattaaatataatttggagatttgttgaattttcagctaatgccattcttttttttttcctttttcttttttttgttttttttttttgagacggggtcttgctctgtcatcctggctggagtgcaatggcgtgatcatggctcactgcagcctcaacctcccaggctcaagcgatcctcctgccccagcctcctgagtagctgggactacaggcacaggccaccacgcccggctagtttttaaaaatttttttttgtagagacagatctcaccatgttgcccaggctggtctgctgatggcgttcgttagctgagatgtgctatatatagatgggttataagggctttgtgaaccctctgatgatgtgtgtgaaattgtgtgtgattgtacatatgtgcatttctctggtcggagtccgtagctgccatcaaaattgatatcatttagtccagtggttctctaaatgtcgtctggcaacccctgaactcattccaaatgtctgtgaagtaaaaactattttcacagtagtactcaggtgatacttgcctttttcaatacattgactttgcagcagtgctgcagaagccatcttagcatgagatcaagacagtagcacaaaagagtacctgtagaggtaatcttcattaccatgtactagcagtttaaaaaaccatcagttttaagaatgtccttgaagcagtgaaaacttaatttgattaaatttctacttgaacacatgtctattaaacgttctgcatgacagaatggaaggtatacctagagaaagaacttctgcaagggggtaaagtggttgtctggaggaacagcattggtgcagctgttttgagtttcaactgcagttttcatggaacatcacttttatttgaagtaactgatgaactatagttattcagacttggatatttggtggacattttctcaaaagaacagtgaaactgatacttcagtgtacagtgtttgttgcccatgatgaaatttgagctttcaagcaaaaattagaattttggaaaacacgtctctgccattgtgagcttgacagcctcccaatacttaaaatattttttcaaataaaatcagtagtcatattaacgaatgtgattttttgatactatgtaatgtgttaacatttggaagatctgtataactcagtaaatcagtcttttacgggtgaccgatgcatgtgatgttaaacagtcatacatcagtaaaagtgcgtgctagagcattgaattttaatgtgacagactaccgatatgttttgagattccacaaaccttcaagaatccaccactgtggaattttggtgtagtatcaaaggtatatccataactacctgaaacacctattaaaatattcctccctttctaactacatatctgagtgaggctggattttcttcatatatttaactgacagaatatattgtggtgcagtacattgaatacagaagcaattaagagaatcttcattctgttaggccagattaaattaaagagatttgcagcagtgtaaagcaatgtcattaattttgttggtggggagggggatgtagtcatttttcataacatttttgttaatgtgtgaggtttattactattttacaatgaagaaatattttaaagtttaaaaggtctttgatggtctaagattttaagagttaaggggatcctgtcattcagaaaatttgagttgttggtttagtctgttcatagatttcattttagtaataatgctttacaagtctcatgaaccacaaggtaagtgatcagaatagtgtactgcttttgtggatgaatgtcttaaaaaattgcctacgaaagtagtttctgtgacttgaaattgtttcagtctcctccctccctgttcttttagataccaaattagatctgccttaagctccttcagctggtgatcttggtgaaggaagaataccttcaggacgttaaagtatctatttttaaacttacctctcccttacagagattaaataccagtaacatatttgccagaataaaataattttttacggttttccccacaatgtctgctcaggtccaactatcaggaacactgaaattctcacagcctaatttagtgccactcctaggttgcctgcctcgtcattagaagtgagttggtgaccttgacattgtgttttattttgagcccaacttgtagcagtttggtgatgtgttgtctgttctaggaaagaaggcataaaattggcttgctaactttcccaacttaactactgaagggaagagagagagggaacaatgtttttctgaaaatcctgaagtgaacaacataattatattttaaatagttaaatttcccattctaaggatgtagtatcaactattgcttaatattttcagtatttttgtggctgttttctactcttgaatgccaaagtttgtagacttcagcagttttctgtccaggtttaaacactgaatgtaatttaaaaaaaaactccgctaatttttaaaaatgaatatgaatgtttttagttaattttggcagtagttgattacaatatcatctagatctttgctcttggcatatgtggaatccttggcaagtcgttgaatacttctatataccacattgccgggagttacgctcttgtagcttttagtttctattggttaaatcctctctgtatgttcaaataccagatggagttttctcttctagaatcttcgaatgatctctctttttccagttcacagggtctgtggaccggtgatctggtttaagaacttctgctctaatcttgagttatgcctgtgtttacacacttactgaaacttctgtgctggattctaaatttggaagaatcaaggatatttgtgtggtaataatggtgtttagactatttaggagggtattttttcttaccggtcctcttattactttttcctgagataatatgggagggattaatcatctgtaaaataccagacttgacagatttagtgtgttcccatcttttttttttttcctttattaaaaactgtctctcatgggtaaaaacattagaaggatatattggattttgaaccagttgcttattttatactttaatcagaaggaaatttaagtttttcagtagcttgtattaagagagaaatcagagtaggtaaaagggattgggggcaaaattttaaaaattttctaaagatccagaagaacatggttagatctggagcagtgttacttttcaaacctgccattgcaggctcattgtaggtctgtctgctctgtatgaaagtagaaatagtacctttttggtgttaccctgcgtgtctgttttttcctgcttaccacaaggtaagattcttaagggtggatgactttctaagggaacaaaagaggaatctttccttttggctaatagagtgggaaggctctaattcaagagaaacaggctattgtaggcaataaatagttctgaccaaatttcttatcaaggcatgcaacatgcaaaaatgtttgttaaaggaattggtagtagcaaaggcattgcttgttctgtctttcttctccttgacataaaatgagcattatttttttttctagcaacagaaccaatttttaatgaaaatttttagctacctaatgtttttatgcatattatagaaaacatataacattaaatttaccatcttaaccattttcaaatacactgttcagtagtgttaactctattcatattgtgaaacagatcctcagaactttttcgtcttgcaaaactgaaactctatacccgttaaataactcccttcttcccctcccctcagctcttggcagctaccattctactttctgtttctgtaaatttgactgctttagattcctcctccaagtggaatcatacagtctttttgtgactggcttatttcataatgtcttcagggttcatccctgttgtagtatgtgacaggatttccttcctttttaaggctgaataatagaccattgtgtgtatatatcccttttgtttattcattcattctttgatgggcattttggttgctttcatgttttaactctcgagctcctagtctttttatatatatggggttcggtgggaaggaaccaggtaggtactttctgtaattaatttgagtagtctaggtagaacatgaaagtgtcagtttaaaggatttagagattggtgtagttttatttttaaaactcctgtttgattgagtctacatctctgatttttatggggagggggcagagctaaggtgagacacagccacaagtcaacaggtatctgttgagttcccagcactgtggagaatgtgaaggagatagaagacattattccttcattttaggtacatggaggtccattttattgaaataaacatttcccatagcacttggcatttggtattacaccctacgtatggtactgtgaaaaccttctctaatgccatgtaaaaattttacagatgatactagagtctgagtagtaaattactttcccttttctaagttgattttatgctgcttgatattgagatggggatgtagtacaaatatttacttgtttcttggagttaaattttaaaaaatcccatattgcaggtctaagaccataaatttgtcttttactgctttcaaatggtcgtgagttggaattttccaattagtatttttagagacttctctaggtgaatgtttatggtagcctacaagctaccatacagaattacaaaaattagctgggcatggtggcacgtgcctgtaatcccagccactcaggaggctgagacaggagaatcgcttgaacccaggagttagaggttgcagtgagccgagatcgtgtcactgccttccagcctgggtgacagagcaagactccatctcaaaaaaaaaaatgagtttctagactggacgtggtgactcacatctgtaatcccagcactttgggaggccaaggtgggtggattgcttgaggtcaggtgttcgagaccagcctggccaacatggtgaaacaccgtctctactaaaagtacaaaaattagctgggcttggtggcgcttgcctgtaatcccagctgctcagaaggctgaggcacgagaaatacttgaacccaggaggcaaatgttgcagtgagcaaagatcgcgccactgtactgcagcctgggtgacagagcgagactctgtctgaaaaaaaaaaaaaaaaaaagttttctagagccaataaactgcatttacaaaagaaaaacattttacagcactgtacttctgagtcatacacagactacatttacatctaacttttcccactgtattaatcaaatctagtttgtacgtctgttttacaaaccaaatataggtaaagatttttatgttttagtaactaggttaaaaaaatctaataaaggttgggctttattagatgatgcatgcctgtagtcccagctactcaagaggccaaggcaggaggattgcttgagcccaggagttcgaggttgcagtaagccatgatcgtgccactacacaccagcttgggtgacagaaaaaattaatacatatatagaatggtaaatcaagaggaatacagcaaatgtatgcttctctcttctttctcccagtttcttcgtcctctcaccagagatgccatcacaggtttcttatatatcattccagaagtattttattttgtatttgcaatgtttttaacagcgcatctttatcattttggacttgaaagtaggaaaatgtattctaggaatccatgaattattaagcaaggtctataggccctgccttaaagaggatctgatgagttgcctgagaaattagcattttcttttaaccagtagattaaaaccatacagatttctatatggagagttgctgagaaggttgtacacatttggaatttacatctagatgtgtaattagtggactctaaacaaagctaagtaaaatctataatatctaagatatacaagtctttaaaaataacagtttgggttcacagatactggagtcttcggattgtagaccttaagtcttctttctccacttgaatctgattgttcctggcagtgtgtaaagtgatcggttcattttggtgatttatttaattaagactgtactacacattatagaataggctagatcctaaagacataatgtgtgttcttaagtgttcagtaaacacgtaggcctttttggtcacttgtccaccatgtctaattctcgacctaatttcttgggagttttgttaatattccttaaaatgccaaaatgtcataatttgtatactgctcaggttgattggaataaagctttgttaaattcttgctatgcagaattcttttaatctttaagaatttttgtttgttaaaggaaaaacaactttgattataaatgtctgagaaatttaaaaaataagtgctcaagagactgagctgtctataagtgctttatatgcattatctcgtttaatcctctcactctgaggataaattattactttcattttatagatgaggaaatcaaggcttagataaagtaacttgctcaaagtcacgtagttggaaaatgggggagtgaggggttgaaccttgttggttcttctgacttcacagcccatgtactatatgtaaatgaaaaaataaaatcaaatataggcatacgtcagaaatattgctgctttggttccagatcactgtaataaagcaaatattgcaataaggtgagtcacaaatttttggtttcccagagcatataaaagttatgtttacattatgcagtagtctgttaagtgtataatagcgttaatgtctgaaacaacagtgtacatgacaattaaaaagtacattattgctaaaaaatgttaatagtctgagccttcggcaagtttacattttttgccagtagaggatcttatcttgatgttgatggctgttgactgatcagtgtggtgtttgccgaaggttggagtgactgtggcacttcttaaaaagtgccaaatgaaatttgctgcatcagttgactctttcatgaaagatttctctgtagcatgcaatgctctttaatagcattttatccacagtagaacttctttcaaaattggagacaattctttaaccctactgctgctttatcaactaagtttatataatattctaaattttgtttgtttcatttcaacaatgttcacagtgtcatcaccagcagtagattccatctcaagaaaccattttctttaaaaagaaactgctcatctattgatggtatcatgaaattggaccaatacatctttaggctccacttctaattctagttctctcgctatttccactacttctgcagttacttcctacatggaagtcttgagcccctcggagttatccgtgagtactggaatcagctcctttcagactcttgtcaatgttgatattttgacatcctcccatgaatcatggatgttcttaatggcatctagaatgttgaattctttccaggaggttttcagttgactttgcccagatctttaagcggaatcactgtctatgtcagttacagccttacaaaatatatatatatatatactttttttgagatagggtctctgttgcccaggctgcagtgcagtggtgtgatcatggctcactgcagccttgacttcctgggctcaggtgattctcctgcctcagccttccaagtggttggggcttcaggtgtgcgccactacacctggctcatatttctactttttgtagagttggggtttcaatgtgttgtccaggctgggcttgagctcatgggctcaaatgatccactcaccttggcctcccaaagtgctgggattacaggagtgagccaccatgcgcagcctatatttctttaataatgctaacaattgtcttgtaagtcagaatcacgccttgatccatgggctacagaatgaatattgtgttagcaggcatgtaaacaacatctccttgtccctctctatcagagttcttggatgagcagcaatatttggaaatgagtcttttttctaagcagtaggtctcaacagtgggcttaaaatgtttagtaaacagtgctataaacagatgtgctctcagctaggcttttttctagagtacaggcagagtagatttgggccctagaattcagaatggtcaatgagcattggcctcaacttaaagtcacccagctgcattagcccctaacaaaagagcctgttctttgaagctttgaagccaggcatcagcttctcctttccagctatgagagtcctaggtggtatcttctttgaatacagggctgttaatacagagctgtttagttgactttgaaaatctgttgtttagtgtagtcacctttatcaattaaattatcttcctttcacttgaacacttaagaggcccatagggtaattgtcctaatttcagtattgtgtctccaggaggcccaaggagggagagagagaggggaactgccagtaggtggagcagtcagaacacgcagcatttttaagaattacatttgctgtcttatggaggtgcttcatggcattccaaaacaattacaatagtaatatcaaagatcattggtcacagatgaccataacaggtataatgatggaaaaattgaagttttgcaagaattaccaaagtgtgacacagagacacaaagctagcacatgttggaaaaatggtgccattcggccaggcgtggtggctcacccctgtaatcctagcactttgggaggctgaggcgggcggatcacgaggtcaagatatctagaccatcttggccaacatgatgaaatcccgcctctactaaaaatacaaaaattagctgggtgtggtggcgtacgcctgtagtcccagctactcgggaggctgaggcaggagaatcatttgaacccgggaggcggaggttgcagtgagccgagatcacaccactgcactacagcctgggcgactgagcaagactccctctcaaaaaaaaaaaaaaaaaaacacagtgtctatgaagcacaataaaagtatgcctgtataatctcgcaatttttatattatatctgttaatatttgggcatagatctttccagcatatagttctttttccacagcaaatatgtattttcaaaactgttatcagacgtacagttttgtattatgtttttttccagttaacatatatgagaagataaatggctgtatgatatttaattggatctctaatgtatttcatttagacatttagattgtttataatgtttgctattgtaaagatcatgatgaacatccttgtgagaatcttattgctttaggatatattatctggaaatgggattgctgggtcgaaaggtgtgattttttttttcctttttttttttttaatggcttatggtatttattgccaaatcaccatagaaagttggtgttgatttttcacttcctccaatagtgaatgggagtggccatttcctgacctcttgacaatacctggcacaatattcaccattcagaaaaatcttttccagttatttgtttgagcacgttcaaatgttggagcctttttgtgttctttgtctagttttctttggtgatgcttttttaaatttatttgtagtatcacagcccttttccccttctgaatcatacattgtagtggaggaatgttggagggaagctcaaagaaataatttgggtctgtattacatgggaaagacttcctaaatgaagtggatttttttcctttttcttttttcttttttgttcaagcaaaggaaaccagagagtaaggaaacaaacatttgagaattgctgtgttttagttttcttatctgtaaatgggaataatagtacttgtctttttatttagaggattaaatatacatgaatgcttagttttggcacatagtaagcctcagaacatttaattgatgtagttatttttctatctgatacccaattaacagaattaacagttgatagcagaagaataaaagcctattccggtccacaaattgagatcaactagtttttgaggttttgggcacattttaggcacttccaataaatatacgttacattaatgactaacatttcagcttggttgagttaggcatttggtaaaactagggagagattagtttcccagcttcatcagaattgggattagtttagggtctggcactttgactattaatttgactaatttaaaattattgtgctgagccgggcacggtggtgcaagcatgtaatcccagttaattgggaggctgaggtgagaggagcacttgaagccacgagttcaaagctgttgtgcacagtgatcatgcctgtgaacaaccactgcactccagtctgggcaacgtagcatgaccctgtctctgaaacaatgaacgaaaaataatgtgtgacaacagaaattcaagcttctttttttctctcttgttttcccttttttctccagttcctccagtgttttattcttccctataattatatattctgcatcttccctcaagagtaatataattgggtggggtggggtgcacctagaacatgcaggagggtccaaagcacccttcactattggtgtcagtttctcatagcagggagggatggagtttgggaacatctgaagggatggtgtcaggcacacggaggctctaaaacaccctgctattggctccccttgctacctagggcaacgttgtaaatagcatattttttacattataaatattttctctttctcctcgttcttctactcacttgtttgtatgatgatctgaatcttttatcagagtttcaagtaggctgacaaatatatttagagcccttggaaaattctccagaagtctgaagagaatagaaatggaaagcaaatgttattataccagtgaacatgcttaattcccctcaattccttattcagaagtgtgctgttttgttaaaagagttgtattggcctgataatcaacacttctctagctttatgtgcatgtgaatgtcctgggaatctggttaaaatacagatgatgatggtgcatttaggtcttgtgggggatcctgtgatttttgcatttctgatcagctcccagtgatgctggtgttgctgctggtggtccccagactatactttgagtggcaaggcagcttatagcctctctttaagggtaagggagacctagtagcttaatttttttactcagcatttttgacagaataaatagatctattgtgctgttctcacatcagttaacatttcttctgtaaatgaataaaatacctctttgggagttttgcactagctcttaaaagagcagattgcatcatactgcaacacgttagccatctctagttgttactttaaatttgtatttcaatttcaagtttggctcggtctaagaccttactatacttagcaaaggtgtgttttttgctggtaatttgcccttaaatttttatctttgccatttttctgtttgcttccttacccttgaggcacctgttcatctcagatcagggcctcccttaccagctatctaagtttaatgttgttttagattgatttttattttatccatgtagctcatgtatatagtttttaaataaaagtccatatttcaaaatacttacaaggcaaatgaacagttttctgtttctctcacctgtcctcatcttgatccactttcccaaactcttttagctatttcttctggtgtttattttcatatttcttttttttctttttttttttttgagatgaaatcttgttctgtcgcccaggctggagtggcaccatcttggctcactgcagcctccacctcttggattcaagtgattctcctgcctcagcctcccaagtagctaggactacagatgcgcgccaccatgcctggctaattttttgtatttttagtagagacatggtttcactatgttggccaggctgatctcaaacccctgacctcaggtggtttgcctgccttggcctcccaaagtgctgggattacagggatgagccaccgtgcctggcctattttcatatttctaaactacatgctcatacagctgtttttaaaagcaatccacagatggaaatggtagctaagaactgaggtccgctaggctcttcctactgctcctcccagctttcttggtgttgttacactgtgttgattgtttaagccagtgttcacagttgtagtagactggataatggtccccgaaagaaatctgcgtcctaatctctggaacctgtgactgttaccttatatggcaaaaggacttgcagatgtgagtaaatcaaggatttttgagatagggagatcatcctaggttatcctggtaggctgtaaatatgtaagcacaaggatgctataaaagggaggcaagaaaatcaaaggaggaagcaagagataggagtgattgcaaggaaagggtcacaagccaagaaatgcaggtggcctccagaagcgaggaaaggcaagaaaatggattctccccttaaagcttctagaaggaaccagcccagctgacaacttcaccttagcccagtgaaactgttttttgactttaactgtaagagaaaaaaattaatggtgttttaagccaccgaatttgcagtaatttgttacagcagccataggaaactcacgcaggagtggacattgtacatacgggctgtataataaattctgatttttttctattattgttttctttagagttaaaaattaccttattcatttggcttttaatctcccatcactgttttctttctgcaccttcaaaagccttctaatgtaattttccacatgatcaagaagaatcagtttatgttcttcctggagttctccatcatgtttcagtctggagtacttcgtttcgttttctgtgaatctgtcactaaatcatcttcaaatcctctgcagagactgaatcccctcctagtatattgaagcacatcagatgttgtatcagttttacttttgccttaagctctatccctccaacccgcgtgcttcaatctgggcagtttctaagcctggtgcacagctgttgtcctgggattttccttcatcattatcattgtgatcatcatcatcgtgggaattcttttgcctctgctgtgttggagctccttgttcttggatctcacatctttttctttcttgttttatgctattattttgggatggtgcacagtatccagtgctttatgggaaaggtttcataggaggtaaaatttttgagatcttgcctgcctggaagagatgtctttattctacttccacactttcaagtttggctggttaacattttccgttagaatttgggaggtgtttcttttgtctgttagcttccggtgttacatttgagaacactaatgccattctgtttactgatttttcctttctggatgatgtgctttggtgtgggtctttttcattaattggactcgtactcattggacccttgcagcttgtagattcatttccttctgttttttccttctctgtttcatttgttctttctggaacttatctggatcttggactttttgtactggtcctctttttttttcccttcccccccccccccccaactattttccatttcctttttgctttacattctgggggagttcctcagttttgttctcaactctttcatttatttttaccattgcatttttaagagctcttttgctctttggaaataatgttggtggtggtagttttaagcagccccggttttataaatggagtatcttgtctttgagaagattaatagttttttgggtttcttttcattttctaatctgagcatctatttcctttgagtttcttttttcttattcatattggtagactggtatctgggaatccttggttgtctgttagttcttaagaatgaggtagtaagagtaaattaggagctttgtgtccactggcagagatattcggctggtgggcttcactgtagggtgatgagccagggacccgcagtcagtatctctagatgagaaggaacttctagtgtcttatctcagtgggaggtgggtaagtgggatgggtcacatcttaagcctggctgctgacattctgggagccaggaagatcaccgagcaactcatggattactatgcagcctttcatttaatcttgtttttaatttgacgcctcaccaccagcttcctctcaaattgataccttctcaaggtcaggttcagtttctccagaaggtaaatgtgttctctattttagagtctagcttctctgtgtcttgcatagatgtttcaaccaatagctgttttgagtctcatgcttcactgcagccctgcaaggtacctggtgcttctgtgtcctgacttgacaaccccttttgcatgctcagaggtttcactttattttgctgagttttctatttttcagcacattggttgttaccttccttctgctgttgccttgcgttttctttgttcttattttagactgtttttattagtttaccgtcattttagtgggtttagaagataaatgcgtgttttacatctacatgtttaacaagtgtatcaaaatgtttatagtttcttttcattcatgtctagaacacttggtaatcactttctatgcaatagaaaaggggaattcacagaatttatataaaagtagatttgttttcttaaatctaaattctgatattgtgtacttctttttttgaggtggagtctcactgttgttgcccaggctggagtacaacggtgcgacctcggctcactgcagcctccgcctcctgggttaaagcagttctcctgcctcagcctcccgagtagctgggactacagacacctgccaccacgcccggctaatttcttttgtatttctagtagagatggggtttcaccatgttggccaaggtgttctcgaacttgtgagctcaggtgatccacctgcctcagcctcccaaagcgctggaattataggcctgaaccaccatgcccagcttgtgtactgtttttaatggccttttctttcttcaattaatagcaaaaaaatgatacaaattaaaatagcttttgtctaagatactaacctgcatttttagacctaaatttcaggcatgaagcagtcagccaaaagccgtgaggttttaaagaacttaatatatcagagaaaacttcagctttcttagataaaaatcagtttatatttttttactcctgaaataatttaaattaacacatatatttgtcttagaatgaagacatttgtcaaagaccttttgggctgctgttaacagaatagtacagactgggtggcttacaaacaaacaacagacatttatttctcacagttctgaaggctgggaagtcctagatcaaggcaactgcagatctggtgaggacctactttctggttcagagacaactgtgtcttgacatgatagaagggacaagggctttctcttaggtctcttttatagggacacactaatcgcattcatgagggctccacccttattaccggatcacctgccaaagacctcccttccaaatacatcatattaggtttcaacatgtgaattttgtgggggatgaacatttagtccatagcaacataaagtagaacataagattatagtcagttactgattgcagggcaactaaaataccagttttccattgggaagatgatttgtcttgaaactaagacaaaggattaagagagtaatggctttctttgttttccatcaggaatactcgcctgttactagtagtacaacatttgtatcgtaggtttagtactgtgctccctctgcctaccccagaggtcattcctgtcattctccccttgctcactagtaggtccagccacaggagctttcttgagggctttgaacttgccccttttattctgaaatagaccttccttcataatcttgactaccctgtgtaaattaactcatttccattccaaccccaaaagagatgtacatttaatgttatctgtttttaaaatatctttactattatttgaaatgatgttacttattgtttgcttgcttattgtatgtaggcttctttctctccagtttgtgagtttcacgtatgaggaaatcctgatttttttgttctgtgattttcattcttagcatctgtaacatttttaggcacaggacagtatctggcatttagtgggcatttgttgaatggatagataaattctgcaatatgtcatctcattttaaaatatatgataacttcagttgtttattttactaaatgtacactttgttgtttaaaatagggaaatgaaataagctaaaaattagtagcacttcccagttttttgaaccagtaaaaggagacccagacaaatccccacagtcacacaagctagtatatgtattattgaccaaactactttaaagacccacatacacagtggttcaaaaaattagcttgtttctctctcacgtgaccattggtggcagagagggatctgaagtggataagctggttttgccagagattacccaggattgcaggtttgttctgctcagggtctaggtgtattgctcttgtgtgcacggtcagatctggctcaaatctgtgttctatctagcccatgggggagaaaagagagagaagggcaagtagctaccttttaatgatgtgacagaaattttattcataacctattgtttagaacttggtattagagaaacatgcagcctctaatttcctgttaaaactctgtgtgtatgtggttttttgggttctgagagtgaaggtgccaggatgtgccattactaaaggagaaagggggaaatggccactcttagggacgattagtctctgctacagctactaattcttagaacttttactcaggactttgttcattcctctttccttcctccttccagtgttactgtaaaagccttataggatcctaattcaaatagtttaatattttttatgacatgaaacaattggaaatttgaacagttactggatatttcatactaaggaagtgcttttgattttttcaaggtacggtaatggtgtttgattatattgaaaatggtggtcttttataaatctttcctgaaatatttatgggtgaaataatttgatgtctgggatgtacatgaaataatgtggcatgggtttatagatgaaacaagattgtctatgaatgtataattgtggaagctctgtgataggtacacaggaattcatatgatgctcttctgcctacttttgtatatgattgaaatactctgtagtgaaacttttaaaataccagtttatactgatacctccaatttaaattgataccgcagggttattccttacttccctcattctatatttatgtcttttggctctcacagtgagaaccttagttcccagccctgtaactattttttgtcagaatataaagatagacagaacctggatatttgataacattaagccaatgaattaactagccctgggtttacttgccatgccttgggactttttatgtgggatgacaatctttttattgtggtaaaatacacataaggtttaccattttaaagtgtatagttcagtgtcattaagtgcatacaaatctgttgtgcagccatcgccaccatccatatccaggactcttttcatcttcccaaactaaaactttatacccattaaaacattaactcctcattcctgtctccccagcacctagcaacccccattctactttgtgtctctatgaatttgactcctagatgtttcatattggtggaatcctacagtatttgtcttttgtgactgttatagcgtatgtcagaattttctttcttaaggctgcataatcttatgtatgtaccacattttgtttgttcactcatctcttgatggacatttggattgctttcaccttttggctatttcaatagtgttgctatgaacactgatcttcaagtatctgttcaagtccctgctttgaattatttttggtatatacctaagaagtgcagctagtgtatcatatagtaattctgtgtttaactttttaggaacaatcatactgttttccatagtggcagcaccattttacattttcaccagcaatacgcaagggttttaatttctcattaacactttctactttttttataagaattttatacttctaggtctttagccctttgatccactttgagctaatttttagtatgatgtaaagcaagggtccatttttttttcttttgtgtgtggatatccagttttcctaactctcatgttttgaaaagactgtacttttccccattcgttggtcttggcagccttgtccaaaatcatttgaccatatgtgcaggggtttacttctgagctctctattccattgatagaacccattagggtggatttttttttatttatacaaaaagtgctttagggattttgttaggaattaaatcttccaatccatgaacatggaatgtcttttcatttatttatgtctttaatttattttagcagtgttttgtagttttcagtgtaaaagtcttttgtctccttggatgaatttattccttagtattttattcattttgatgctactgtgaatggaattgttctcttaagttcctttttgggttgttcattggtagtgtgtagaaacaactgatttttgtgtgattttgtgtcctgtatctttgccaaggtaagtgattttattccctaagtgccgtgctaaaatgtttgtaaatcacctttctttcaacacctcacctggaaatctggtgagatcaggtttgacccttaggcactgtgccttacatgtgctgtacaggatagctacctgtgttggttatatcctgtacagccatatgtggtagacgttatgtgggtgtcaactctcttgttctcttgagtattcatcagcagaagacgaaaaagcagaatcctggttatttggcaaactctacatgttgtactccaaggtgtcagatcagcaaatacgttgctgcctgattcagttttggttgattcttcccctccgatatcattaatattctcaggagatagagtgaataagctattgggagagggtaaaagagatacatgatgtagggaacgtttttttaattgttaaaccagaagtgggtattttggtttgtgagttaaaatactgctggtattctaacttacgattagtctttaagtattatgtatattccacagtgccaggtgcccactgctgggcatgcagttgtaggtacttctttataactctggctagtttatcctgtctgtgcaattagttcatactgctgagcagctgtgtctccctgccttttacaattgtaggtatattgttagtgttgctgtgctcactaagttttgtgatgttttaaacggaaccaagtttggtggtattattattatttttttaaaagaaagcagttacttaaattaacatggtagaaaatatcctggggattgatggtgtagattaaaaatctttgttttatccaacaatagaattgaattatatggctaggaacaccagcaagcacttcctgtcacagttatcgaaacagtcttttaaagaatgtctagagggccttacttaaacaaatagcttgtcttgactttgggaggaggatggttacctaagcccatgtgttaaaacagacagatgacacactgaaatgaccaacgagcataataaggagaattcagtatccttggaaaccctggaacggtgccataactaaactaaaaaaattttagcaggaaacagtacaaacaagaaacatcgtgagagaaggccttagtgttcatttctgtggttgtgaagcgctagtaggagtaagtgacaggacctactttgaatagccagagttagaattgaagggggagccactggacaattggttcatgtattctgtactttgaaactgggattgaaaactaaatggctcttaccaagagaaatgtgaccagagaaatgtgacctgagagagaagcacaaagttgaaactctgcccccaggctgccttctttgtcaggcagccgcttaaggtggccccagtgatccctggcttctggtatttatgtctctgtgtaaccttgtccctttgagtgtttctggacctctcgtgacttgcttccacaagtggggcaagatgctgggatgctgcttcagaggttaggttacagaaaggttttggcatccatgttgggctgccctatttcacttgctgagggaagccagctaccatgtttgtgtggttccctgtggagctcacatgtcaaggatctgttgtctctggccaacagctggcgacctgacacctgtcagcagccaggcgcacgagcttggaagtagatctcctcctccagtcaggctttcggatacctgcaactttgtgagagaccttgaacgcaaggccccctggctaagtcacacctagattcctgacctgttatgagataataagtgtttgttgttttaagctgctacctttgggacaatttttaaggcagcaatagagaacttatataggaagtaacaatgtcaacatttcccctcctcggtctaagatttgaacttggttctaatgtgttttctggttgaacccaacacagtacccaatattacataaacacaggcccttttctttaaagatacatacagagaatgatagacacatccagattcagtaggtactgtaaaagaagttgaccagtatgagcagtaacttcctatgaaatagacttagtgcaggaaacaagagaaactgttgaagtttaaagagcagctaattagttgctctgggagactgatgagaatttgaaagaatcagagagcaggaaggagttcttaagtgaaatttgtgactctctggagtcaagtagcagcagggttttagaaatattccctcaatacaatgggaaaaagaagttgaaaattgtaacaaaaatataaggaacatagcatttgttttcgttgattttctcagttgcattgtgcacgtttcaggtgctcagtagctgtgtgtgactagtggctactgtactagacagtgcagaatagaacatttctatcgtaggaagttttgatggacagtgctgtggtagagtgtcttccagagaactctgaggaaaaaactatgataaactaagaatcctaaattgatgaagttatcctttacataggcagtgcaacaagatggctttttataggtgtgcaggaactcaaagtatatcactcgactacttgggaaaaaaaaaaagacttaactacacccagctgagtagttagcatctcagaagcatgataagtcaacttcagcattgtttaactctgtatcctgtttcccagaacaacccaaaacttacatataaaagtaggggaaaatcttcatctttgacagctattaagaggatgcccttcttaagccaaacttcagaccgtcagaacggtggtttcaacttagttcaattccagagcttcccctctccttttgacgataaataaagccacaggaagcagcagtttttaaagacattaatccattgaaaccacttttgctgaaatcactaaaaagtctccaagtcaccaaaaccaagtttcattctcagccctctcttgatctttaagtacctttggatgcaattcatcactgcctccttttaaaaacacggtctttgcctagcttccagaaaacttcttcctactcactagaagttcctgtgcagtctccttttttacctggtctccaggcttaatccttagcccagacctctggctttctttatctatacttattcactaggaaatcacatttaagtgtcatgtgactttaaatgttttctctgagctgatgataccctaattatatctccttttccctaatctgctgtcagatcaatctagctgactatgtagaaaacacacacacagtttcttgcacaacacttctgataacatatattcatctgtaagtttttctctgtacatcaagcaagcaatcagttttgcagcagacaccagctgggtgtccccccattcagttccaacactgtctacctggaaatagcatcatattccccaggttgagggggctcggtcccacaagactgcccccactttttccaatgccagttggaagccccaggttgtttacctgtgcctctgaccaagtggccatacatagaggttaccaagacctccttcttgggttcgattaatttgctagagtggctcacagaactcagggcaaacatttaccactttattatgaagggcattttaaaggatacaaatgaacagctacatgaagagatatgtaggacaaggtctggaagggtcctgaatgcaggagcttctatccccgtggagttggagtgcgccacctacgcagctcctggatgtgttctagtttaccttcctggaagccctccaaactccgtggaggcttcattatgattaagtcattggccgtttgtgatctgctcagtcttcagccccactcccttccacttctctgtggctaccacctgagttctgactcctctactctcttaggctactgcagtaacataggaaccatttcttccttcctccagttttcattgttttcacacaacagatttagaacctctccagtgtcttatcacatgttaggacaagtccactgcccttttaccgtggcctacaaggccattgccaccatttgtcttacagagtctacattaatctcactggctttcttgtttgcatcaagtttgccagcctcttttctcattaggcctggcattctggaatgctttccttcaacaagtttggatggctcattcctatgtcttcattttggtttctgcctaagtcaccacctcagagaggctttctttgaccaccctacctgaaatagtattccccactccatgactttttattgttttagggctttatatttttagagcactgagcactgcctgatacattttatattattaatttgtttatagtatgtgtttatcacaagaatgtaagatccatgagagcagggatttttgtttgtcttactcttgtacctagaaatagtgtctaatacagcttccacgtggtgttgagcctgtgggtgcacagaagtcaagaactgaggtttgggaacctctgcctagttttcagacgtgtggaaatgcctggatgcccagacagaagtctgctgcaggggcagggccctcatggagaacctctgctaggacagtgcggaagggaaatgtggggtcggagcccccacacagagtccctactggggcattgcctcgccaagctgtgagaagagggctaccatcctccagactacagaatggtagatccaccgacagcttgcaccatgccccgggaaaagctgcagacaatccacaccagcctgtgaaagcagccagcagggaggctgtaccctgcaaagccacaggagcagagctgcccaagaccatgggaacctacgtcttgcatcagcatgacctggatgtgagacctggagccaaaggagatcatttcggagctttaaaatttgactggcctgctggatttcggacttgcatggaccctataccctctttgttttggccaatttatcctatttggaatggctatatttactcaatatctgtacccccactgtatctagggtgccttgtctcagatgcaactttgtactgtggacttttgagttaatgctgaaatgagttaagacgttgggggactgttgggaaggcatgattggttttaaaatgtgaggacatgagatttggaggggttggggcagaatgataaatggttttgctgtgtccccattcaaatctcaacttgaattgtatctcccagaattcccacatgttgttgtgggtggacccatgggggggtaattgaatcatgggggctggtctttgctgtgctattctcgtgatagtaagtctcatgagatttgatgggtttgtcaggtgtttccacttttgcttcttcctcatttttctcttgccgccgccatgtaagaggtaactttcacctcccgtcatgattctgaggccttcccagccatgtggaactgtaagttaaattaaacctctttttcttcccaatcttgggtatgtctttatcagcggcgtgaaaacggactaatacagttgtattccctgtttagatgctgttaaataatatttcatgtaagataagtatctgcctattaatgatattaggtgcattcagctgcataagtacctgaacattattcttggctttcatctgtagctgtccacactttatcaattatcaagccttgttttatgtactttggaaatgtatcttaaagtttgttcacttatgacccctctttggccttggtactttaatttcttcatttgttaaatgggtatattgatacagccaacttaatagttttgttgtgatgattaaatacctaacatagagtatgtaaactttacttatttttatttattttttattattttttgagatagggcctcaccctgtcacccaggctggagtgtggtggcgtgagatcttggctcacagcagtctcagcctactgggctcaagccatcctctcatctcagccccacaagtaactgagactacaggtgtgcgctgccatgcctggctaatattttgtattttttgtagagacgggttttcgccatgttgcccaggctggtcttgaacttctgagctcaagtgatcctcccactttggcctcccaaaatgctgggattataggtgtgagccaccatgttggcttgttaggtaaatgttaaatgttgctgtctaatgataaccatattttactattactggctcaggtcactatcattgctaaactgggatttctgtggagtaactccaggttggtctccagttttccctttgcttaggttcctcccagttctcagtctccttcacttcagtttgagcaatctaaggtgcatgtctgactggattgcttttacttaaaattcccaagtggacttctttttgtcattggaataaagtctgtaaaatgttttgtaacataccttaaagactccgccattttctctaaatattttgcctctttgttttcagtttgtgggtgaactagaacaattctggcaggaaacaaactgtattgggtgtgactctaccaagaaagatggatagtgaagtgctttctgattcttatagcatagccatagtaatcctaatttgtaaagattttagggagatattaatagccagatacccattctaattataaaaataccttaattaggcatacatagatgcaagagtttcatactgtactacttgtttgtataatctccttgagaagctatttacattatacttaataaggccactgaatgaggtggtttgcttttgtgaagttaattagccagttaaaagttgaggaacatctaatgaagatgataactaactttaagtctagaatgctcaatttagagctcttctttctaacatatgtaacagttatataccagggcttattgtctgtttaaaaaaccacacctatagactaaatgtattagcagctgtttatctttctgttcttggttgcagtaggatatgattccattccattttatccaaacgggctatcagattatccaggaacaagttacaaagaagggaaactggttccaggacacatctctggaagttaccttgtggaccctgagaatgtgttacaggtgtgccaagatccttcagcccttggaagcgggtgcctgagtggggtcttagctgactagagtgcctgggcagacaagagcagctccatcttctctttagagtatgttacataagcattaaatcgagggtgtgccctgacgtaaggaaagtagaagctcaccagcctgctgcactcacatcagcgagagggaacatttgcccctccatgcctactgcccttcccgcccttcagcctcaggttacaggaataaataagttaattaatcccaagtggggagagcctttgaagagtattaaaaggagaggaaggaatggttggaacctgttcccatcaggaacagatgagtaggtcaagctttattcacttttaaggaggaagggattcctaaaggacaaaccaaacttgcttttcagggcgttacaataaaacgttcttaaatcctgaatatcacacatttctgggaggaatgtcctgccctttgggaaaaatagcaagaacttcgagctccctctagaggccagcagtgataaaagagcgtcgtagtggtctgtagggaaatcattttacaatgattagctaagctacctttcagcaagaaactatcattttatagatgtattatccagtaaaatgttctcttatattgggaagaaattggtgcctttgaaaagaaatttgggttaatcatactctaattagctatgaggggccaattgtaaagttcatttactgtgtagaaatacagctgagaagatcatgaaaatgggtcatgtgacctaacagaatagtatattctaaccattggaacaaaccagatcaagatgagaacctgatttctgtgctgttttgtgccggaatgtttcgacagtagacctttgaattgaacagaggtaaaggtgatctatagtaccagctgtgttctcacccactcctccccctcatctgaacaaaaccagtgagttccagaagattaatattaggaaatgcaagatgcaggcatatgttaaaatttctgagtaagctaacatatacagtttcttaactttttcagagcctcagtttactaaatgatccatctattattccaggatagacattttagtcataaccatatatgtcaaggagttagttatgggtttaaccctttgatgtatttagtccttttgttctcaatatatttatacttctttatagaactcactgagagagttcagttctaaaaacttagtatgaactatagaatgacagaagtgattttatggtaatattaatatgtaaaagttgcattcccaccaggaatatgtgaaagtaattgcccaatacctgcactaagtattgcctctttttaaaaaaatcttaatcattggaatggtgtgtagtggcatatcatttttccaccttgtggaaatccatctattatcaaagtttccatggttttatgcaaatagctatcaaatacctgtcacctggtttctctttccgagctctggtaactattccataattccctgattgttttatttattttatacaaacaggatcaaatgtactttgtaacattttaaaaactcggtgatacatcgtagaccatattcttagagatttgttatttttttgtactgggtatgtgcaagcacatatggccagacagcagaggaatatttactaaaataatagtggtttcctcagaagtggggttaagagtgatgattatcctttttctacaaagtagtttatttgtgagattaaggaatgaagttaattttaattaaaaacctatgttatgataatctcattactacaagtgatctttaaaaatcatattgtatataaacacatctgatacataatttgcagtttgcatgaatctgctaaatgactgttccaggggtgagatttcagggtttcttacactttattttttgtgaattggttagtttatagtgataattgtatcttttttatgaacataatgccatcttaaatatttacatatttagattcctataaaactttttaaagtacctttattgcagtactgattttaaggttcctaagtggttgatttaaccattggctattaatctttagctattttgttgtggtcagacagtatggtctttataatttgatttcttggagtttctctgtgactcttaattgcatacctttttagaagaaatatatacttttaatttggtataatttttctgtgtatttgtcatttatattttttaggtgtctatcccttctccctcccagctcccatcactgttcctgtcttctactacctttttttcaactccttattcctaataaccctgaaattgtaaagttaaaatctgcattgggcattgggcataaaaatttatgactgttacattctcaccataccttttatctacctacctgcatagtacaaaacccccttttcctattgaattctttttaaaaaaattccaccagactttggggacatcatctgtatttattaggcatgggtcaagtatgctagctatttggcagttagcaggacagttttgaacaagaaaaattgttcgatggtctgcatagcttagaatatactgccaaatgttcgtgatgctggaaaaaagcttggttattttctaagcctacaaactgttttacttaccaagggttttttcaggggatagaggccacgacttttagtactaaagtttactgtgtaaatcaagggaatgttatactttgaaatgttgggattttttttacaaagaattcttcacagttttgcaaaatcacatcactactgcaatgctgctaatggattttgagttgtgggtaccatatacccgtgtaagtctacatttaacactgaaccctttgtgttgagtactctgcatacagtgtcatcataccttgagtatttacatttagtcatcatgttttcaaatagtcccgccctgccccttcccaggactgcagtgatacttacgttagagcacttgatgttatcccacaggtcaggtcttggttactttttcttcctgtctttgctttattttgttttgattatagggtagttcttcaacttcttgatattttccactacagtatttaaatctgttagtcttatccaatgtatctttcacttcaaatagtatgtttttttatttttagtcacatttttgtctttcgtcttttatttctcatcatgttgatgatttattcttttttcttttttttttttttttttttgagacacagtctggctctgtcgcccaggctggagtgcaatggcaccatcttggctcactgcaacttcacctcccgggttcaagcgatcctcccatgttcaagcaatcctcccacctcggcctcctgagtagccgggaccgcaggagcacgctacagcacctggcttagtttttttgtttttttagtagagacagggtttcatacgttggccagactggtctcaaactcctgacctcaagtgatccacccgcctcagtgctgggattgcaggcgtgagccactgtgcctgggccatgatttattcttgatcatatggagcatatttacaaaagctgtttttggtccgtgtctgctaggaccttaattctttcatttttgtcacttctggctctgtttacactggtttttcttctgattatgggttgtattttcctgcctgtttatattcctggtaatttcggattggaaaccagacagtgtgaatttacattgtagagtgttggattttgttctagcacatagttgagacacttgggatagatttgatcctttccaaggatcaaatgtttgttgttaaactttgttaggacaagtttagtctttagtgctgatttagcctgattactaaggtgtgacactcttgtgagaactctacctgctggtggggatttctcttctctggctggtggggaccctaatttttcagagcctcatgtcacttcatagatgcccagatcagtattcagccaaagattctaagtgagccgcctatagataccttttttggggtactctgcctttacgttgtagctgctttaacctctggcctctggattcttcataactctcaccatgctgtcttggtgcttccagtcagtaagcaagagctactacaggaatcactttcttttcctttctaagagtatccaacccacattcattgtccgttgtctgaaaaacagttgtttcatatattctattcagttttctaatctttcacagcaggacaataaattcaggttatcttaactcctttgtggccagaaacaagaccagttatcagatttttaattttgatttttatcttttactttaacctcttgaaagtagtagtggtaaaaatcacacatttttattgggtactttttctgaatgcctttgtttatgtagtcttagtgttctttgttagtctttgtcttttttactgaaatataacaaaaagtagaggagactgattacctagtagagctttacaggaagtcaaatgttatttgtagaaagatacgagttattatagccagcttgacgagagcattttcttccaggtatgaacatttaatttcgtattagaatactacattggcagccccatttgtttgtagatacgtgctctttacacaaatgcagccctttgtggcagtatttggaatacagaattttaagaaatagtggttactcaatagaattttcacaaacttcatgattatcttaagatttatgctattttgtgttgcatgaaacagatatttctggattttcagtgttgtttatttgctacagcaatgtttagagtgttttatgagttttaaccttttaaattgttactatttcactgtaaagcctaattatattgagggaaataacagaatagggtttgtcagcatcttaaggaatggatcctacatcagctgtttcaaatggcactttcaggaatctataaatcagatggttaaaaatacttaaacaggccagacgcagtggctcacgcctgtaatcccaatactttggaaggctgaggtgggaggatcacttggccaggagttcaagagcaagccggccaacatattgaaagcctgtctctactaaaaatacaaaaaaaaaaattagctgggtgtagtggtgcatacctataatcccaactgctcaagaggctgaggcagggagaattgtttcaacccgggaggcagaggttgcagtgagctgagatcatgccactgcactccagcctgggtgacagagcaagactcttttgtctcaaaaaaaaaaaaaaaaagaagaagatacaaattgatatcaaaataccttttgaaaaaaaaatacttaagcaattcctctcagttgtttcttcccctcctttatttttatttttttaaaacgggcatttacatattaacttggtccttatgtcttgtaattcatgctgtagttgtttattttgccttaggatactcctttgatttttcttaagcatttactgaatcctttattggttaatgcttcatctgtagggattacagtgctttctcttagccacattagggggtagaatttagaatgtgtatcacccagtgccttgaatgtagcagattctgaataaatatttaaaagttgtagggacaggcagtaactgtaatgtggtcattaataagtagtataaagttgatgttgcttggctctaaatattttactaaacacagacattttgacaatgaaaaagaggcaataaactgaatacttacacattatcccttttttcatcatccagagatttatagaattctgtgctgccaccttatccctatagtgctaaatatgagtcctgagtctgacagttgatcactgtgtgatttttcttaggctggttaatcactctaatttgtttttctatacattgaaaatgatatgcatattacagtgatgttataaagattaagagagaataaatgcccacttagcacaatgtttggcacattttggttgtaacatctgtatgtgctttggcattagtttgatatgactttgtgttattttaatgccagtatccagttaatataaagcagagtttggcaaacattttctgtaaagggccagatagtaaatgtttccagtctgtgccgtctattcaactcatgggcatggctaagttccattaaagaattatttacaaaaacaggttgtgggccgtagttttccaacctgtgactagaggttacttttgtatttctttgtcttttttgtttttgttgctgttttcatttgacagctttggtacaatgtatttcttaactattgagtatttcaaataccttcagctgtattaaaaattatataggtaatacagttataaccctctttgcactttgattaatttctttcagatcacttatttgagacatagtcctcaagtggaattatgaaatcaaagagtgactccataaagtgcctcacaacacaagagctgaggtatttagagaatgccaaggctactaataatttagtcttttaatggatagtaattatttgttacacccatttatatatactatttgtgaatttccccttgctgatttttatactgagagttacatttttgaacctttggctgtatgtgttctattgtgtttcttataatacataagaaacagaagataggtggcaataaggaaacggccttatgaagtaaaaaccgaccaatgacactgttgtcattcccactaccaattgctcttccactcacaaaagaaagcaattatttcaccttctaagagtgaaacctgcctgggtgctgacagtttagaaagagggggtggaaaaagtaagaatttcattctgtataataaattaccaatcccttggtttgcattaatagtgtatagataaaatttaagaacattacattactttttttttaacaaaaatactcttatgccttttaaatactacctttatatcgcacaatttggaagtcaatgtgtatctaaaattgctgggttgacttaatgcatagtagggcagtggactaatgttctgaaaggtccttctttattaactgtattagaatgttcttttgtaagattaatacaggcatttttcattgtaaaataacattgtgattggtgataggacagatttttccttttaaagaagttgtttgttctttggcattttggtggtggtggtttgtgagaatataactcaactgatatactatactaaagtatgcacaaattcggtatgatagctctgacagtgatgtcagtttttgcttttaaaaaacatgatacacagtgcattgtttaaaggtgcagaattctcaaattccagcattcttgggtttgcaataaaagtcagtatccggccaggtacggtggctcacgcctgaaattccagcatattgggaggccgaggtaggcggatcacaaggtcaggagattgagaccatcctggctaacacggtgaaaccccgcctctactaaaaatacaaaaaattagccggtggtggtggcaggtgcctgtagtcccagctactcaggaggctgaggcaggagaatggcgtgaacccgggaggcggaggttgcagggagccgagatcgcgccactgcactccagcctgggcggcagagtaagactccatctcaaaaaaaaacaaaaaacaaaaacaaaaaaagtcagtatccactctgtaatgttttagacctgtgctgtccagtctggtagccgctagctacatatgggtatcagaacatgagaagaatattttctaagagtagattattttctaaaaacctggataccagtatttagccagccctgtttgggtgtagcatgaaatggtatccctgtttgcaggactgtgcttcctcactttttgcatgtcatggcattcctaaaaagcagcgatgtttgtatggcacactgggatacacagccgaggatgcttacaactagggcttaccgatctgagtgctctgcagcaccaggcaagaccataccccattcttggcatgccggtatgcagtggcacatacggtacaaagctgcttcagcgtgctccctataactcattcctggatgtttttcttggtctatgagcggaatttgaattcattctcccttcttatttcatcatttttatatgtcatattcccagtgagactgtgagacattggcatttcacaacttagaagagctttcaaagcatcatccataaacttagagatttagtgagtaactgtatatgatctttctcttctcttttgtttaagggagaaaggaggaaggaacaccatgacgtagtgatatatttaaattctgttttagaaaccaggaaaatagttttcctaccagaaatatgattacattaaatatatgcggtataaagatcacagcaaggagaccatgaatctgtccatctacccctccccgaaataaaattactctacactattcagataaaaagtgacttggttggctgtttctgaaactttctgtttattggcttttggcaagataaatagtaacaaacaccagtgtcttaaaatctaaaaattggtaatccatgtacctactgtttatttccctcaaggattttacagtgagttgacttttgtggtgtaaatctttggttcttgtcctttcctgatatccagccacttgctgtttgggccagttgtttctaggattcctcaccctacacaagggtccctcttaaaattctttacctttgctacaaaactagttcactgctaaacacataaccacatcactgtacgctaaaaatgtcatcataaaataattgttcctgccataagaagtgatacgttattggagcaaatgtcttgtttctgttgcatcttgcaatcaagtctttttcttctccccacacacccttcaccttcctcttccattcacatgttcagtgattacattataactggttgtgagagtcccctgtcttcagtttggaatattgtacctacaatcattacttgattcttgttctgtcttctcataataaaataggtaagggctgggtgttgtgttttgtggttcatgcttgtaatcccagcactttgggaggtcaaggcaggaggattgcttgatgccaagagttcgaaaccagcctgggcaacatggcaacaccctgtctataaaaaaataaaaataaaaaaattagactggcatggtggtccgcacctgtagtcccagctacttggggagctgatatgggaagattgcttgaacccgggaggtcaaggctgcagtgaggtatgattgaaccactgcattccagctggggcaacaaagcgaaaccccatctcaaaaaataataaattggcgtggaatgtgccttcccaccccacccctcagtctcaaatctcaattgttttactgtaatgctgtccttactgacttaatcatctctaggttttacgtgttcagttcacttaaggaatattaaggtttcttccttattagaaattgagcccggctgggtatggtagcgcttgcaaacttccagcagtttggaaggctgaggtgggaggatcactgaagaccacaagctcgagactaccttgagcaacatagtgagaccctgtctctacaaaaaaattttttaaaaattagccaggtatggtggtgcatgcctgtagtaccagctattcaagagactgcggtgggaggattgcttgagcccagaagttcgacatgattgcaccactgcactccagcctggtcaaaaggcctttttttttttttaaagactcttttaagaaaaaaaaaagtccatgctgcaccaaacctacctgtctaactttactgcttagcagagagtgtagtcaggctagtcacgccatggtccttgacatctccttactaagtgatagttgtaacagctcatcagcctgacaaggagttgtaattaatttaggtggatgcaacaacttggacctgggaaagagataaaataagtaatgggcaactcggcccattattccactgagttgaacaggagaatgagtctggtattggtttcagatgtgagcatttcaccaagctgagagcatattctagagatcaaagataggtattttggtacagcaagatttcatattcaaattaactagttcatttgatggttaggctaaaaaaaacccagcaaattatcaatgctgtagggaaaattgagctggacttacgagaaagaatttgtgtcttcagggtgtctgtgtgagggatttgaatttaaagataatcttgactctgtatgtttgtattattatttgattttagagcctaaccctcagatttgattcaatattttttgtctgctactctttgctcctacttaactccccagttgtactctaatgtgctttaagtgcagggactttgtatatttttaatcctttattcgctgtagaagtcagtagtatagtacagaactcctaatcaaatgacttctcagtacttactggtgtttggctttatgtactagcccagtatattcagttttacgccttttatgttacttaggtaagcagttactcaggtaaccaccgtggtgtagccaggggttttttaacctggcgttgagttgttgtccaaacagtctgagataatatgcacatttttatgagcacttaaatatgtgcagttttgtgggagagcatttgtaacttttggtagattctgaaagagttcaaaaagattaaatgccttggacctagacaacggaggaagaaaagaaaccttctcaaaatctgggctttaaaaaattgctaaaagaaaattatgaaatgcagtgctggatagattattggtgaaatacatgtcagtaaatttaaaattttaaagtatgtatatcatcagattcttaaattcttaacagtgagcttctgtagaccagaggatgtctgttcttttataaagctgatttattttaaatgcacatgataggggcttttctaattcagcttaatgctttatagtgaagaacttcttaatgacacagtgatgaattttaccatgttactgctctatcttatgcccatttctgtaatttagactttttttcttaggaaaagggctctagtgtgaaaaaccaagaaaaaaaacttgacagttttctttgatcatgactgtgaagtcagcactgagctggtagaatccatgtgacgtgactgattctagtggtcctgcagtgtaggggagctggaggagccgtgcacattgaaggcacatagcacgaagcatttctgctataaaaaagcgggatctatttgcaaacacttgtttgaagccatgattttgaatttatgacttaaaattccatctaaaagtatttttacatttaaaattccctctccttattagtaatatgtgcctttattatagatgattatttgcatttgcataaacaagcttatcaaatgtatataagaaaattagcaagataatgtttaagggtgctatcagaatgattcacaaattgttgatttctttgcattcacaaatttagtgaaatgttaataaattagtatttgttgtattctctgttaaaatagtttcatactggtttattctgaggagaatttttattagtggatcaaaatatttatgaaagaactttagattcatgttatttctgatgggtggttgatgtacttcaaagatatacttcatagacttggaatgtttgggaaaacacgctaagttctgaaactagtgagtcgggaaagaaaaactaatatctttttttgttttgtctcaattatacagcagatataatttctacagtagaatttaatcattctggagaattactagcaacaggagataaaggtggtagagttgtcatctttcaacaggagcaggaggtaagtgtttaaagtttattgtctaaatttcagtttgatcttaggactagagcttgtgttgcactggagaatctcatcagaggatgttggaattttaaaagaagtgtgtgtttattgaatacaatgtccaatatatagacagctctggttctcttagctttgtatgtgtgcatgtgtgtacatgagcgtatgttgttttggtttaaaaacataacactaattgtaaaaatacttgattagagaagggggtggaaagtgatggaataatccaagattttaacggttttgaagccttggcccttcattataatttttcctttgaaactccgtaaagcaaagttgctttgacttcttctcaatgcttggtttactttgtacaattgaggggtgagaggctagtttaaagaaaaagcagctcaattattttgatgtcagttcataataatactgttacaatgatttaaatgtaaaggtttaaatgacagttgcatgtacatgcatgtaaagtaacttaaaagtgcagtgctagctttttgaagaaagaaaattgcagaatcggtaattaaagtgggcttttgttttgtttttcttacaacttaggcacacttctaaatttaattgaccagatttctcactaaaaattttttgctaaacaaaatttgtcacacttggttttttcttattcattctctccttccatttgtagatcagagtttaaccattaaaatcagttgttttggaacattctgcccctatttataatatatttaaaaagtttaaagtaatgtggataaattgcagggttttacaaatacatgtctaaatcataacacagagttaggttttaaaggattgtgaaattccttaaataagcaaagaatctagtaataatactactactttgcacttctatagcgcctttgacctgaggatctcaaagtgctttacaaacactaatgaattaatcctcacaacaccccagtgaggtaggtaatttaattttaaaagaaatgattaatagtgtctgattagaagatgcacaaacactaaatatgtcttttattatttttttcgtttggaagaaaatatgaaaataagactcaagctttgcttgacaaagaatggtctcgtgggaagtggggggctaaatcagttttctgtttttaagtagccaaaaactcgaccataagaatcttgacatacttagagttgacatggaaccttacattataatttcattataatttccctttatttactaacaggaaagtcaagatataaatagattactttattacttagtggcagaactaacaagcagaacctgaacttttgacatgtcgtttttcagtattctttgctgtttttcatgctagataaccaaaatgtgaaagtttttatctagagtttagagcagaccttcccataggtgttctctgcccttgaatgtattttttactgaaagttattgactctctacactttacttttattttaaagaaaagtgtttgagaaaaactcgtaaaaattgattttgccctaggcttaacattctgagggtttcagaaagtcttcatttttaatgaaggcattgtgtcattgtcaattctaaaatacaagtttgtcaattaaaagctaatttggaactattttgcctgagaatgaagtcattttcatctcctgtggtcgtttgttgtccaagtcaaaatcaagtgtggaaaaaatggctgaaaatttttttaattgggggaaatgtttgttttaatatgggtttagtaatgtagtcagaatattagtatttagtattttcctaaaggctgttagtaatacattaatttgtaattaaattccaaatttaatagttactgaaattactcatttacttgtattagaaaataagacaaaattattttaaagataatcatttcccgtgattcttttctgaaaccccactgaagattctaaagtgctaatattttaactacattttcttgtaagaagaattgagcagaataactttttgggaagggccattgataggaaaaataggacctccttttcatgtgtctcattcttcttaactatatttaagaattctagatggagagttttgtagaaactcagtaacatgtcttttgagaattacttagtggtgtaaatatcagcatgtttttaagtgatagattaagtaaagatgatgatggtgattgactcttcacttctgaaacttgatcttgactattaatttggtgtgttttgcctatttaattttctacattttaaagccctgtcttagagtttctaatacagtattgtcttcagaatctatgtcattggtcataaatatgtatacttgacacttagaggcacctttgtttcaatacctaatgtaattggatgagattttatgaattcacatctagaggcacctttgtttcaatacctaatgtaattgaatgagattttatgaattcacatgtatatatctgtaagatagtgttacagtttgaaaagtgaaagaaatagtcctttcctaatttgtagataaaatccaaattatttaacaaggttatattgcttcatttagtagcaaaaatcaggttaggatttgggtctccgattttcaatccaactattatatgttcattccagagtacactggtgcctaatgtttcttagactctgatgagggtgctagccttgtttgcagaatacactggcatttgatctattgtggctttattctcttacctagtggcagggttccttcttaaacttgactttactggagaccaaaatatctccacccactcatttttattgtctttacttggaagaagaagagatcatataacagcaacagagaacttggcacatcagactttgacatctgtaacccctcattgtctgcctcatttattttacccttcagaagtagctagtctccttcctgtgatccaggcgggtatctgtgtcctcttgctgcctgtccgtttattccccaatcgtaatataaagaaactgagtagccaattcagagggtcttcatttggtttgagtatgtttcagactgataattgtttaatatttttagctgtcatttaatagcattgttataactaatatatttgtataggtattctgctacacggaatctctgttgtagaatcagggcacctaaagaaattgaggcacacaagtaaagtgatttccctgatgtaatcacagccatcatgtgatcagtgagagtccaaaattctgataacaaatccagtgttctttatagcatgacccgatataagtgacccatgttatttttatagcttctaatagcttttgacagcaaagtaaatgatagggtatattctttttgttaatgaaaatattaatacagggttttgaggagaagagtccaaacagctattaaagtggataatgatgttctctaggttttagggatttttgttgtttccatgggtgctcaaattaggtaattagcagttgtcaaagtagctggtttcctactgagttgggttgctcagaccttcagtttctctgagactttgtgatgtaccctgtaaggtagtgtgggtgtgtgggtgctgggttaaagggacagctaagacagaaggtgaggagggaggttgtacctctttccacttctttttataatttttctaggttggtatggggcctttgatttttgttttctagggctgctggtaactttcttggatttcataccctctggctttttttattcttaatgtggtattcccaaaattccttaacaggatacagaagaaaccttaaaaagcatgcttttcacaaaaggtggatagtattgttaatatgatagtattacctttctaaattatatatggctcaaaatgtttgcatgtatttaaaatgcagatttctgggttgggggccgtggctgatgcctgcagtcccaacactttgggaggctgaggcaggtggatcacttgagggcaggctggccaacatagtgaaaccctgtatctaataaaaatacaaaaattagctgatcctggtggcacatacctgtaatcccagctatgtgactgaaatatgaggatcacttgaacctaggaggcggaggttgcagtgagctgagatggtgcctttgcactccagcctgggcaacagagtgagactgtctcaaaaactaataataaaaaataaataaataaaatacagatttctatcctgctcctcaagattactaaatcagaatatgtatgtatatggtgcattcatagaatgtaagagctaacatttatagggctttctagggattcttaacttttttgttgtcatcccatggattcctttgatagcctagtaaatcctgtagacttctcagattttttttttttttgagatggagtctcactctgttgcccaggctggagtgcagtggcgtgatctcagctcactgcagcctccaccaccagggttaaagcagttctcctgcctcagcctcctgagtagctgggactacaggtgcacaccaccacacctggctaatttttgcatttttggtagagatgggttttcaccatattggccaggatggtctcgatctcctgacctcatgatccacccgtctcgtgatccacccaccttggcctcccaaagtgttgagcgtgagccaccgtgcctggccagaatgtttaaattgcataaaatatttaagattataaaggttgaaataatttaccaaaatattcataattgagtaatatatgttttaagtggataacagctggattacgatattaaaatgtcatttctgtttgacagagtcacaagaattgctaatactatatgcagtttgttacctatgcccataatcaaaagaaatgctgaaatttagctggaggttagtgaaaataaatgtgtacattttccccccatccaggcttataaaatccctgggttctgtcattggacccttgtgtccatgagccctcaatttttaacccctggtagtgcagtctccttttgccagctgggggcccaggtaccagattacccatccaaagtcatacagttaataaggaagtgattcttcactgcagaagccacacatcctgatttctactgcatggctttgcccactctaacctggatgtagtagcagcagtttatgtgctaggacctctgccaagatccctaaatcttacttaatcatcacagcaaaataacaaagatgtatgtatgtttactatatcttgatgtattacaaatttataaataaaatgagatttagagaggataagtaacatttccaagagcaccctgctaggtaagtgggtaaaagctaattctgtgtaaatttggatgagtattcacaatgctggctattgatattaaaataaaaaaaactttaatcctgtttggtgtgatgagcctaattgttagaaatcacacaggaaaatcagtctcattactttatacctaatgaggaaagtacgtgatccttagactttttaatatgagctattgagtgatctgttttctgtcataggtgttagaggggaaaatggactaagagttgaacagccttggttctagtcctggtattcatttatgcatttgcccagccatctcttcttgttcagccttttagcgtccagatttctgtccagactgccatcagattcttgtcagctacctgttaatcttttggggctccttagggtattacatttcccaaaagcaaaatatcatgtattttaaatatttaaaatatcggctcaatgggtacctaattttacccgttgagcagaaatttgaattaaccatatttcttatacagggtgagtatcccttatctgaaatgcttggaaccagaagtgtttcaaatttcagatgttttcggattttggaatatgcgcatgtgtacataatgagatatattggggatgggacccaagtcctaaacacaaattaaattgtttcatatacaccttatacatatgacctgaagataattatacaacattttaaatcatttgtgcatgaaacacagttttgactgtgacccatcacatgaggccaggtgtgaaattttccacttgtgtcatgttgacagtaaaaagtttcaaattgtggagcattttgggtttcagattttcagattaggtatgctcaacctatccccaagaaattctccaccaaaaacaactccaaatctatgaaattaataatgcccagtaattttggaattaattatttaattaataaacttggaatttatttacctttccttcttcctgtgctctccctagcctcacacatataaaacatttcattgtattcttattattaataatttttccctcttaattataaattcattatgctcgatgtagataattcagtaaatatggataagtggcaaagaatgcatgtataaccccaccaaacaaaaataagaacttttggtatataccaaaggcctgtctttctgaatatctgattataaatttagggttgtatgattttttttctcacatactgtatagtgaataccttttcatgtcattcagttttctgtatcaccatctctgtaatgacatgacatgacataattatgtttatttgatctagtctctattgttagattcctagattgtttatttctgcctcttttttcagggttgggaggtgagcgactgcccctttgcagttactgtgtttttccctctttctaaaaaaagaaaagtagcaacttggtgattgaaaatacattatttcattggattttggttttactttacgccttaatactcccaataattaaagcatcttgttctatgccctctttttctagtggtgtatttattgaatttggatgggccacatattgtgagagacggcatcagctctttttctcacgaggcattatgtttttcagctttgttgattggctgcctttaaattttattttactttttgtttttctgcccacagattatttaaacattcttttgttcccttttaaatttattatttagttagactttattaccctacattatgtgatgaagtgatttttttctcttccaccttccccacccattcacagattaccagtcgggttattattattattattattattattattatttattttagttttacagagtctcactctgtcaccctggctggagtacagtggcatgatctcagctcactgcaacttccaccacccaggttcaagtcatccttatgcctcagcctcccgagtagctgggattacagacgtgcaccaccatgcctggttaatttttgtgtttttagtagaggcagggttttgccatgctgaccgggctggtctcaaacttctggcctcaagttatctgcccacttaggcctcccaaagtgctgggattataggcatgagccaccacacccagctggttattacattatttattgaaattttttcacatggatttaaaatgcacattagatcagtcatctgcagagttgtgtctagacttcactatattttagcttttcaaagtcttattcaaggatgatgaactctgctagtctttctactttattcgttccttcttacagttgagttgtgtagataggttttgaaatgtattgaaattgggttctttctcaaatatctctctatagcctttcagagtaaatacttgatcagaatagttgttgttgcatatttcttagtgtctagttattaagaaggatttgacttgtgcctttacaaaggggaattttctagcgaacttcatctgtagtcaatttatcaggggtatggaggactttcttattagaatgttaccagtggaaaggacattgaagactatctgatccgatcttatttgttatttctccaatttgaggcacagagaagagtctgaaatcaggcgcctcaaatgtcggggtgtcatgcatttacctgcatcatgttgtttctaaatgatagaatttgcacttgatccttatctggaagagaaactaatatttgaactttacttgcttttgcattaaattcccaaagttatcctgtcctgagagaataaattgtatttaacacatgaagaaaacgtgatccaggggattgttatattttatgaacttcaaagggaaagagacacaagtagtaaaatgaatctttttttttttttttaatctaacaccaggtagggttcatctgaatcttctctcagagagaaaccaactccttaagggtccaggttagattgaaattccattttgagagaaacaaggttggagagccttgagatctgcctccattccttggttgttgatagaactggggaagagcgctagcatctgagcaaggcacagttttcgtgtggggtgtttgtgtgtgtccacgcgcatgtgcatggagggttttttttttttttccattcctttcagtaatgtgtaaaatgtagaataaataagcattcctcctatgtaactttatcacttaatctgtagcatagtttagaacagatattctagctagtttgataatctgagtgaaagcactttaacaactttaggttttaaagcattatattaattgtattttatgcatttcctttaaattttatttgactatcttatagacaaataataatgctacttgatttgactttctaattgtttcaaccaggtatccttcattcagatatctctcccactatattattgtttttttgataggatattgtgactgatacgcttccaaattgcacttagaatagtacataataggcactcagtgaatgagtattaacttactgaacataatttaataaggccttgcaaaatcttgaagtgctccatgactatcgttatcattagtttagagaaagttttgagatttctcttgtgtttatttcatcgaatgacttgtattttgctttattctagaaagttccccatattttctgaatgtgttgagagtagttatcagatatcatttaattttgttttgtaccatttctgccactgtccctgaatgcccatttcacaagacactgactcttttaaaatacttttatactgctataaaatataaaacaaatgactgcttacactatatagaagatgaacattaataaacagtaagttttagtagggttctatttggaggcttaaaaatattcatttattttctgctatatgagatcaaagtaaaatacatttattattttcttaaatttttaaattttttccacggagcaaagtaaatatttcctacatttttgcagagtttcatttaaggaaggagaaagttagtacaggttgagcattcctaacccaaaatccaaagtattccagaattggagacttattgaatgctgatgtgataccacaagtggaaaattcccctggcctcatgtgatgggtcacagtcaaaactttgtttcatgcacaaaattaattaaaatgctgtataaaattactttcaggctatatgtataaggtatatacaaaaccactgaattttgtatttagacttgggtcccctccctaagataatatcatgaatatgtaaatattccaaaatatggaaaaaaatgtgaaatctgaaacacttctggtcctaagcatcttggataagggatactcagcctgtaaaagcacaatggagttacttatatttagaagtagctgttgaaaaatgttaagtgaaattctttcagaagtttgcctttaagtcttgactattcttagtatgtttattgcagaaaataggaaaaatgtgtatcatttccacaaagaataaaatcaaaaccatcccataacaggaatgaaaaatgaagacctgtgtgtgtgtatgtatgtgtggttttctcagggatttttgttttgttttacagaatgagactcatgttgtacatatcactttgtaatgtttagttttatttactgtcaatgttttctcaggttgaaatattgcctcccagtcagggagatgaagagactgttggaaccattgagtagaaaggggcacttgaatagttgggaagaacatactccatcttataacttaggtgacaaggttcaataaacttgtggcttgtgggaacagcttatacttctaccagtagtatgtgactttgcctttctgtcactaaaacaatggtcattatcacatttttaattttttgttcatttaagggaaaataatattgcttagttttggtgggtgggtagatgtgtgtgtgttttgttggggatttttgttttgttttacagaatgagactcatgttgtacatatcactttgtaatgtttagttttatgtactgtcaatgttttctcaggttgaaatactgccttccagttagggagacgaagagactgttggaaccattgattgggttacttccaccttttggctcttgagaataaagctgtaatgggcatggctgtccaaacacctctctgaggtcccattttcagttctttgggataaaatccagaagtgggattgctggattatatggtagttctatttttagcttttttgaggaatctccacgttgttttccatagtggctgcaacatatgtgtggtatatattttaaaatctttatttaaatatacactgaaaagtacataaaatactagcagattattacatagcaaacatttaggtcaagaaatagaacttcctacgcttccacaaacccttctcttttcccttcctctcctttatgagcctgtcttattaatgattattttggcctgcagttttagaactttgaatagatggaatccacagtttatccattatgagtaatgttgctgtgaacattcttactcatgttttttgctgtacaatcatgagtagaaatattatgcccatagggtaggcattcactgttagcagacatcacagtaaaaagttctgctaattttattcttgtgaacagtatataaattttatggctgttctacatctttgccagtgctatgtgttgtattatcagtcttttaaaatttaacactttgtgggtatgaattaagtttgtatttactgtttgtttgtttttttttgagacgaagtcttcttgctttgtcacccaggctggaatgcagttggtgtgatcttcgctcactgcaacctcctcctcccatcaagtgattctcctgactcagcctcccaagtagctgggattacaggcatgcaccaccatgcccagctaaatttttgtatttttggtagagagagagtttcactgtgttagccaggctggtctcgaactcgacctcaggtgatctgcccgcctcagtctcccaaagtgctgggattacaggcatgagacatcacgtccggccttgtacttactcttgtgattcacattgagattgagtagttgttgtgttgttttgagacagggtgtttctttgttgcccaggttggagtgtgcagtggtgcgcttacagctcactgtagcctcaaacttctggactcaagtgatccttcccacttcagcctccccagtagctgagactacaggcgtgcactgcaacacttgactaattttttttttctctctctctttttttggtagggatggtctcactgtgttgctgatcttgaactcctgacctcaagcaatcctctgtcttggcctcccaaagtgttggattacaggcatgagctgcgactcctagccagagctgctttttatatgtttattggctatttggatgttatcttttggaagtgactatcgaaatctcttataattttctgtgttgtgtgtcatttttcttactgatttgtagactttctttacactttttgtagatgaactctttttcagttacatttgttggaggatccaggggcagtggctcacgcctgtaatcctagcactttgggaggctgaattggttggatcacttgagcccaggaaattgagaccaggctgggcaatatagcaagacctcatcttttttaaaaaacaaaacaaaacaaaacaagaaaacccacacatttgttagaagtatttttcattctgtgacttgccttttcatttttttgaatagtatatttttataaatagagattattaatataatacagttgatcagtatttttcttagggttactggtttttctgtcctgtataagaaatacttttcaaccccaaaatccagggaagacatttccgttatcttttagaactgtatgactggtactgtagctactagatccatgtggctattcagattaatggggagttgagtctgttctctctcccctaatgcaagaccctgttgcagtggtccctgtctccatggccctctttaaagtcagccttactaccttataaataagtaaataaataaatttaaattattaaaaataaattgtagaattaacttccttagttgcagtagccacattttaggtgttcagtgtgtgcctagtgctcaacatgactagtggcaaccatactggacaacacagatacagactatttccatcattgcagaaaagttctcttgggtcctgttatcctaaaacttaattattgtaccttcacatttatatctcttattcatctgtaatcactttacgagtggttttgggaaggggtcgagcttcattttatttcctatgaatagtcaacctaacaccatttagtgaaaagaccatcctttccccattgcccagcaaggcaacctttgtcatcatttaggcctgtttctgggccatctgttctgtttcattggcacattggtgtatcctcatgccagtacacagtctttatgactttgctttaaaacttggttatgatgtcctttagtgaattctgttagcatctgtgttgaaaatgtgtgattttggttttgtgtcctgtgtttgtaatgtatgtaaagtatgtgacatagctcattctaaatcctgctttgaaagtctttattgaatgcctgttatatgtgccaagtactgttataggtgctggggaataaagcacatctaaacttactgtagaaactttcatgcaaatagattgtatggttaggaagatgattctcatagtgatcataaaggcaagcaagaaaagagagggaggtgaaaatgctgtgcaggtaaagccagtatgaattgttgaaggatgtgtcacaattctgtatgactgtaggagaggtttttaaaacaaaaacattgtgtttgattttgatgcattctcatttgagtggctcagtgttgagtatgcggttatgtgtcttcttattcaggcttgctcactgtactttgtttgtgcagggaacaatgctatcatgatcattataatgtaaacatcccctcccaaagtgttaggaaaagtctgctgcagctccctgtggtctactgtcagttaccacttgtacccatctgttttatagcctcttcagttttgttactgctgctgtcatttctgccattactctttgtcctgtggacttgtttttaaaagttctgttatgatcactttaataaagtttcaggagagaggggaggctaatgcatgtgctcagcctggcatcttgagctttttagacagaattttctccttttgtgatacattaatttatttcctgttgcaaagagatggagcttcttgcagtccacgaaactgccatatacctctatgattttgtttttggattctgtaagataccatgtttagtagacctgtgttgttgtccacgagtctacaggaagatgttcatgttttgtttcagaaaatatttctgttgttttgtgcttttcttaactcatcaaatacaatgtgtggctcgcccttggcccttcatattgcttaccttaattgtgtagaccataaccagtttctactttgactaaagtttgacgtacacaagttacttgaatgtggggattctgtctatccctctacgccctagtgtacatagtactatatattatagtctctttaagtgttaaatgaaaaaccagtctaaaatgcaggatttatattaaaaatcgagttgcctgcttaatggtattgtggtttccttgtagactataatgataaattttgtgagactgggtgagtcattttaggtaaaagatttgtggagctttaaagtgatactggagtatttatatatgttaatggaataggctgtctaattttgtgtatgggtatggtgatgagaccaaggctctgagtctgatttttaccccttgtgtatccccgatatgtggatcgttttgtgggacatgtattcttaacattggcagacttgccctctaataactgataactgctgtccaagggttcaaatacaaccatccatgaatgaacaacccagatcatcaggctgctggaaaaaacaacccaaaacatagactttcaagatgattcagtgaagtttccttttgatatggagaatagtaataggctgtttttattatcaagaagttctaaacatttcactgggtaactcacttttacttaaaatagttgactgtcaataatatctcattctattttttacttaaactttttccataggtggttctttgaactagactttcaaatttttttatgaaaatgtttttaatcgtgtgataataggtcaaaagatgaaattctgaacatgattataattctcacttttgctgagatattaatgctaaccagagtagttcaaaagtagtccctttatgagatagcttaaattacattttttcaaagtgatactaaatgaaattagtcatcagtgtgtgccaggttcataagatgagaaagcaaatttaaggcgagtaagcagttgttgatgggggtgcatggggccattgctgggtagtgctgaatatggacttgattggtagcaaagctgtctggaacagtggtcttggggtgggaggtaggggtcaaatggtatcccttcttttataagagctctttttttaagctttcagcagcgaaataaccaaaaggcgggcagcagaaaggaaaaggacaatacatcatattaaataacagatcggggagttgaccctaaagtgggcataggaagaaggtgtgcctcacctagctctttctgggcaagactttatcattatttttagatgaacttccttattatgggtgctcagttttttttcatcagtttttttcatagactataccatcaaatacataagagtaaattagcaatcaaattgatccatatttaacgtcattatttccctaatgaattgagcttatttattcagctttatttagccttttcccccgttaagttttctcatttaatccttgaaggcctttagaaatataaaaaacagaatgtaattgtataaagacacaactaatggggtattgagaatgtgcagggtcctttggaattgattacatatttgattattttgaaatatttttcaacaatggtccatatatttttgttttcattttagaacaaaatccagtctcatagcagaggagaatataatgtttacagcaccttccagagccatgaaccagagtttgactacttgaaaagtttagaaatagaagaaaagatcaacaaaattaggtggttaccccagaaaaatgctgctcagtttttattgtctaccaatggtaagtatacatattttctttccatgtgcccactgtgtgtacctgttgcacatatcctgtagcctaggagaggaatcatttaacagagatacttgtaaaaaggacttttgtttttctatacagaatgtaaactctacttttttactgtcacttgcagtttttagattctctgaaagattctctgatagcaattttttgtttactacacctccaatttgtagtgaaaagaatgggctgctataccattggatttaggtcaggtaatatttctgtcatttctcagtctcgtaatcttgggcaggttactaacactgaattgaattttcctcagcagcaaactagagatagcaattttttattatagtattattatgaatattaaataacttcacatacatcatgagtgcaagtgctcaataaatgttaatttattcctcctttttaagtgtttgtaaactacacagagtatctcaaactgcagatacaaaatactcaaaggatggtctccattccaggatacgctataggagagcactttcttacttgatcaccattagcatattgccttcttcccagcaatccacatggctggaaggagattcctctcctactgtttacttgccaagggaacattttttgttgttttttgagacaatgtctgtcgcccaggctgaagtgcattggtgtaatcacagctcactgcagcctcgacctccctacctcagtctcctgagtagctgggaccacaggtgagtgccaccacacccggctaattttttaaaaacatttttgtagagactgggtctccctatgttgctcaggctggtcttgaattcctgggctcaagcagtctgccccgctcagtctcccaaagtgctgggattacacgtgtgagccactatgcctggcccaggaaaagttgagtgaggattaaaagttagtaatgacaggccgggcgtggtggctcacgcctgtaatcccagcactttaggaggctgaggcgggtggatcacgaggtcaggagattgagaccatcctggctaacatggtgaaaccgtgtctctactaaaaatacaaaaaaattatccgggtgtggtggcgggtgcctgtagttccagctactggggcgggggtgctgaggcaggagaatggggtgaacctgggaggcagagcttgcagtgagccgagatcgcgccattgcactccagcctgggcaacagagcgagactcgtctcaaaaaaaaaaaaaaaaagttagtaatgactctaccagaatttgaaatcctttatgatgagttgggtgctttctctttgttcttatgaaaaactttttcctgtgaattgtttggactttgttggggtcttgagtctaaagggaatcattagagtgactgaggagatactttagtttctgggtagccgtagtctataaaaatttgtgattaaaacttttttgaggttggtgctagggtgaggggaacctcttattttctcatcccctcactattaatttaaaaagcaaattctaacacctagaccataaacatttgcagaatatatacttaaatgacttcaggatgaaatgggggaagaaattcagcacttcctccatctaattgatgcccctcgtccacagtattagttcttagaaatgctgttcacaaatgcctgatggccatcagcgttggccgcctcctgggtgcccgtttttctgatcatgaaagctttccccagccagtccattgagatgcgtaccctctgccttctctgttttcacaatagactgcattcccctctcttgtccttattagaagaaaaataaagagaagtaactatttaaagcctgtaaatcacagcactatgggtggagggaacagtttattcctgtcatatgctagcttctagtcttgggtcagttttaatttatatggtaaactaagttatttcaaatagcttcaaatattttagacactgttctttggcatcagatgatacataattaaaccatttatataatttctacttttagaagtaaatgttcctagggaaatgtgttgttaacattttatatattggaatatttttatgtcagtttatttcttatagggctacatcagctttcttataaagagaactttttaaatgtaggctgagttcaagagaatagtatagtgaagccctgcatgctcatcatccacttctgacactcctcagttcatggctaatttgtgtctcggatccttccccttcccctcctcctcagtgttatttcgaagcaaatccgattacaacgtctatggattaaatcttgtttaaagacattagagaatgcattgtagatttttgtcttttgtttcttaatactaagtaaaatacagctaactgggggctgcattttttaatgctaaaataagtgcttaataatagagtccaatgtggaaggataaagcagattatgagaatcatatgaactgttgtgtctgggtagatgggaaaaggatgggaggagtaggacttgaactatatctgaaaaactatttggaaagaaggagacttagagaaaaatgtcaacatctgttgattctgagtgatatcttttatattattttgtgtatttttctctgtgagttttttctgtgagcatagtaacaccccccccccccaatataatgggtctatataaaaactatatctgtgggagaatgatggaaaatagtaccaaactttccaggtttgattaaccaaaattaatcttataaaaatatttgcattggctttccatgatcattatatgaactgggtttcccagatcatttttacttaaaggacgtcatagtcaccttataacttgagttaatttaatgttccttcaagcattttaattctctttctctttaatcttcttttgctcctctgaattctcattaattcctctacattgcagaaaacatgaaactgacctgtcaaccatgagtgttacatatatgaataatgtaaagttcactcataaatagggtgtgtcttaacaacttcttgataagttttttagggtcttacataaagctgcattcccacaaaggaaacggcagcgtggttttccctgctcatacctctcataccttctgcttgtggtgagaggaactctgttcttctgcagtttctccaatgctttagttattagtgttgataattcaggggaacaccacagtgtggtcgttttggaaggaacagatcttgagaatctaataacgtctccactgaaaactgtgtttttacataatctcacatacagttttatggagtttgattattctcacatactttgtcttatgggccaaaaactccaggtaataaaatatcactgctgtagaacataaggattctgattttttaaaaatttatgtcatatttattaacatactgatttatttcctgcctgccttgtccccaccttactgaaaaatgtatcctaattcatatgtgtcctgtgtttgtgttaaggaaaaaacattttttaaagagctttcttcctgtaaacactattaggcaccacaaactaattttatctcatctgaaagtttcataaatacattgtggtttctttatttggatctttaataaggaggatggatttaaacaggccacaagacaactggaccagggggcgggggtgttgtcatcctcatcacaaatactttgcaagtatttagaacaaatacttctcagaatacagatttaggctaggctcatatctatctataaatcatatacatatataaactaaataacacatagaaaatctgtatgactgaactacaagaaaattataagcaaggtcacatagggcttagaagaaataatagattacagatgattaaagttagcagtttttctctgtttacacttcatcattgggaagggcatccttaggggcaactatcattcttctgtacgatacagagactgccaggctagagtcactggcatctctctgagttgtttctgtttttataaaatggctttatatactgttataaacaattttgttacaccattttgcttatgaaagatcgttaggaatgtatgcttttctataagaaaaactgttatacaattgtaacagttttaaatcaacatgcatgagcctatagtgatacaaataaacaattgaatggatacatggagagcagggatgcttcctgcaggagaattctaaataagacgtggatacatactcttccctacagggagtataacttatttctccctttaagtacaggctggatttagtgactcacttccaaagaacagaatatggcaagggtgaaagagtcattgtatagtggagaagcctggcaaacattgtcttaaccaaatgacccaagttaacgccaccagctgtaagtcatgttgataccatgtatccctttgaacaatgctgtgagaagtcacttcatctctctgttctgttcctaaaaacccatggtcccagtctgatcatgaggaaagagcaagcaaatccagttgagggatattctacaaagtacctcaccaccactactcaaaactgtcaagatcaagaaaaataaggagagcctgagaaacttaaaggcagagagactaaggaaacttgatgactaaatgcagtgttgtttgaattctggagcagaaaaggaatgttagtggaaaacctggttaaatctccaaatgcagtctgtagttaatagtaatatacaaagtcgacgtcttagttttgacacacgtaccatggttgcgtaagatgttgacagaagaaactgggtaaaggatatatggaacactgcaattcttgtaactttctgtaaatctaaacttaattgtaaaacaaaagtttgtttttaaacagatgccattttatatatccttgatacctaggaatttggtttcttcttgaaggacttggggatgtatgcttttaatcagttttcttcaggccctgtttcctacttgtgaaccctgatacaagaaggggaaaggttttaaaaaggaggcatccagtcctatggaggcctctgtggaatctttgataggctctgctaagaagtgggagcaagggagagcagctttactattttgattctacataataggcagtcttaatcaacttcattgttccctttaaattttttaaaattcagtactgaacatgtatatgtttacatgtaggtacagacatatatgtgtttgcatacaccacacatgcatatcaagtttttccctctagctttaattacttttaagggacagggatagagacctgtctgtgacttgatttgactatcacatggaatttatgagtgccaccaatctttgcactttatttccatgtgtgtatgttattcagctgataataggaaattttttagtaagttcagattagggtttttttttttttcgtggaatccttttacgtgaaatgtgaaatagcatattttaaatgccttaaaatgtttttcttcttcagtattttaaggacttttctttattttcttcccagataaaacaataaaattatggaaaatcagtgaaagggacaaaagaccagaagggtataacttgaaagaggaggatggaaggtatagagatcctactacagttactacactacgagtaagtacataagaaaaaaatgtcacagatagtgcttgtattcatattatatagcccaaatcctgagcagagcttgaataggaataattacagtctatctcccctttcccagtaattctgtaatcaggtaggacattgagtaactcatttaaacatagaaactgacctacatagaggtctcactttggccagggacagaagcaggactcaagcacaagacagtatttcacgccatcagacttcatctctggtttgtcatgttagctatcacaaggtcaagtttcaagataaattttctttggaaatcaaaaaagtagatacagatcaaatcttctagttgtagctaaaaaataccaagaattagatgttatgggttaattttctttttagcctctttaatctgaaccataaacatttattagcttggcatgtctttcaagcaaaatattgaaactaagaactgcaaattctaatagtattgcaaccagtaaaagaagatatattatccacattgttcattttttcttcagcactcgaaaggatcaacatcagttgctttttaaaactaaatctatgtaatattgttctattttatgttctcaaaaactgaaataatgaagttttctgaatcttaattgctatttgaaactgagccttttgtaatttctgtttttcatgtgtcttattgacaggtgccagtctttaggcctatggatctaatggttgaggccagtccacgaagaatatttgccaatgctcatacatatcacatcaactcaatttctattaatagtgattatgaaacatatttatctgcagatgatttgcggattaatctttggcatctggaaattacagacaggagttttagtatccatttggttttctttggtgtttggtgaagaaggcatgttgtgcccatattagatttatttcatctctcctaatgaatttggttgctttttatagtctgtgtacatatatgtatggcaccttatttttttctttgtagatgagtaatgaaatactggaaaaagttatttgctaaacataaagggcataatgtattgatttaaaattggattcatggaattttaaggaatttgtctattgtatctatgtaaataggattattttttataatttaggtttttgttttaaaaatcacatttgtgaggtctgtgtatggtagcttatgcctgtaatcccagcggtttgggaggctgaggtgggaagatcacttgaggccaggagttcaaggtttacagtgagcttgattgtgcctctgcactccagcttggatgacagagcaacaccctgtctctaaaaaaattttttttcttctaatcaaatgtatgaactactgtatttgaattttttattgtaaaaatagtctcacctggctgcggtgactcagcctgtaatcccagcactttgggaggtcaaggtgggtggatcacctaaggtcagtagttcaaaaccagcctggccaacatagtgaaaccccgtctctcctaaaaatacaaaacattagccgggcatggtggcgcatgcctgtaatctaagctacatgggaggctgagttaggagaattgcttgaacctgggagatagaggttgcagtgagctgagattgtgccattgcactccagcctgggcaacaagagtgaaactctgtctcaaaaaatatatatatatagatttatatatattatattaattgatattaagattagattaagattagattaagattaatcttaagattagattaagattaattttaagattagaaaaagattaataattagattagattagaaaaagattagaaaaagaaagattaaagattacgattagattaagattagaaaaagaaattcacgcaagtcatgatgcatgattgggtaaataaaaatattctattgaggccgggcacagtgactcatgcctgtaatcccagcactttgggaggctgaggcgaggcggatggatcatgaggtcaggaggtcgagaccagcctggccaacatagtgaaaccccgtctctactaaaaatacaaaaaaaaaaaaaaattagtcagttgtagtggtgtgcgcctgtaatcccagcttttctggagactgatgcagtagaatcgcttgaacctgggagtcggaggctgcagtgagccgagattgcgccactgcactccagcctgggtgacagagtgaaactccgtctaaataaaaattaaaaaaaaaagttttaatccctttggaatttatactcataaaaacagtggagtgcaattcagaattaatatttttgcttaggtccatgaatgggttttaggtttgagaaatgtagaattatatttgcccttttttctaagtggaaattccttaataaaatgttatctagacattgtggatatcaagcctgccaatatggaagagctaacagaggtgattacagcagcagaatttcatccaaacagctgtaacacatttgtatacagcagcagtaaaggaactattcggctatgtgacatgagggcatctgccctctgtgatagacattctaaatgtaagtttattgtatctttccttaaaatgattacatattctgtttgtctgaaataagcctcagacatgataagtacaattacagaggttcaaagtcttaaacccgtgtgtccagagccacttgtacccttggtaatctgcctacctcctcatgaggcattccaggttattcctggaagctctcttggggggcatgtctattgattgccaaggaatatatctctcatggaatgctgttgttctttggtaacttgcggttgggctctgtaaccttgtattgaagtagagctgttcctttctttcccatcctcccttcctactttgagcttcctaggaagatttcttctgaggtttccttggcttaaaaaaaaaaaaaaaaaaacaactttggtttaaaaacttcaggatacaatattcttgtcttgttgaatattaactcatgaaaattgatacatgcctgttaccaaaataattttacctggctactagaaaataagatcctggtatgaatttgggatgggcgaggatggtgtgtttctcatggtgatgatacaggcagtcagtgaggcatattgcaggaataataccaataaacctggtgcactgaagtcagaagtcccaggtgagtctggttctaaattagtcatatgactggaagtatactgcatacttatgcatcttcaacttcaatattcaattaaactaagaagctttcaggagaattctagccagagagatgtttttcagttctttattagcctggcattttacctcacttgtagggagtttgtgaatggttgtttaggaaatgctttgtccaagccagaatattgtacaccttgccctttttgtgttgttttgttttgtttttagtgtttgaagaacctgaagatcccagtaacaggtcatttttttccgaaatcatctcctctatttcggatgtaaaattcagccatagtggtcgatatatgatgactagagactatttgtcagtcaaaatttgggacttaaatatggaaaacaggcctgtggaaacataccaggtatttgagttttttctttcaatgagcatataccctgtttactttgaagtgtttatagagaaggattttgttactaggttttaatccctgtatggtgtttgttcaccattaggccttttccctcagagatctatgagtatgttgctcttccttatgttaaatgtatatatacttacataggttgtgttgtctcttgagttttgcagttaaagtgtgattttgctacccatttggttcagtattgacattgtttttttttctgccactatgtacatttaaagtgaggatggaagagcacccttcattgaggtctgggcaggaagaggattggagaaagtggccagtccttagtagaggtgcacctgctcaggttgtgggagtagttgaactagagattaaatttggtgtgccaagtcaaatggactggtgttctgccttttggcagataactgttgtcttcagctaaaagaaagggcttgaaagccttagcagatggctttaggagttgcctatccgttgttggatgtcagttcttgattctcttatcagccagccactactgtttatccgtgtccactacatcaaacagaagagaatgaagtacacagcctggaacagggtgagggacagcacaaacctgtgctaggccctagactgcagtgttgaaatcacttaactctaatttatacatatactttctttatgttatatattctcaatagactgggaagtatgtttctcaaactttaaatcctctgacaaacataaacgaagattgtttttgatacgtgaaatttcaaaataaatactgcactgaaacaaaagacaaaatactgctttgcttttcaaagtatagttcactattgagcaacatggatttgaactgcatgggttcactcatacacagattttttgttttgttttgttcaaccaatgcacatttgaaaatacaatatttgagggatgcaaacccctcaaatatatggagggccaaaacttcacgtgtgggttccgcagggctaactgcagatttgggtatacctggggttcttggaacccatccctcgtgtatactgaaaaaagacttctatttgtgtaactgccaagattgatatatctcctagttaccctcaccatcatttcattcccattgagaagaattgatttgaagcttagcttcatactgatgtatagtgagaaactctataatgtgcattctaaaatgttgctaaattatgataatctacctaattttacctgatttgctacttttctacttataaacagttggagtagtgattaaaagtagtcacattataggcaaatgtatcatatatagataaaactatttttattgaatttgtaccagcatcttgccaagttttgtgtgattgaagggtatttttttcttactgatttttttgtgttacatgctcacttttgatcctaaccccacatgagttgctattcctctgtattacagattttcacttaatgtcacagagacatggcctgaatcattccactatatttaaagttaaaatagacactgaaaataagtttagattgtttcatatagaatagagaattctaagcatttagaaggtaccttctcatttctgtcatttctccttaagtagctccttaaaaagagatggtgaaatatagacacttccttttttcctttgagttacaacaaatactttggaacttttgtttgtaattaatattaatgttgaaatatgtcatatttctcagactttttaaatatgagatttctagtttatccttttttgacatattagtaaatacagaattatataattcaaaaaacaggcacagctttgttagcttttgacattgtataatatgatactatcaaatttttaataatatatgcccagaataaccatataatttatcaccaaaccaaggcatggttacgctatgcatacatgtgcatttataatggaaaatataggcttcagttaaatttatgcccagaaaatggtatttaagaaagaaataggcacagtttcagtgttgttatcagtagttaatggactgaaagccaagaatagtgatattcagatattgctataatgttcttttattagtctcttaactgtgccattttcaagtgtttttggcctgaatgttttattcaggcttataaaggctatgtgtgccatgcccagaatggagttttcctttgtcataccagtaggaaaatgtacctccctgaagggcttgtgtgttttgtaaaaggacaaaatgcctttattgttactgagaagattgagattaataggtttaaaaggtgtgtgtatgtgtctgtatatgccctttttttctttttaaagatatggacttgttaaatcattttcctaatttcagtgcagtatatttgtatttttcccccaggtgcatgaatacctcagaagtaaactctgttcactgtatgaaaatgactgcatatttgacaaatttgaatgttgttggaatggatctgacaggtaattaagtcaaacctctcaaatatgaattttattaaagaaaagaaacaactatttcattccaggtcctaacttcgtctctagggattccttgaaataaatttagtaattttagatatagcacagcagtactggtagataaaaaattaaagcattgtatttcactagtaaatataaaagtacacaaattctaggtaatctaaattatttaaatgtctagaattttttttcttttatgaaccagatcacatttctgacatgctaaccattaaaacggtgaagcttcagcttggttgttattcttccattaaactgttgcagaaacattcaggcggcagataactcatttggattgttagaaacaccaggttttccagatgctacattaacacctcatagaagtggtctttcatatgtatgttatgtatgatgttaaccataatatatatggttaaaattttagtagtagttatcctttgctttttataatttccagttttgccgtagtgtaattcctttttcgtattcatttttagtaaaatgttacccattatttaaagataaaataagtcttactttgagtcttttagttgtctatttgccactatgttccagtagaacagaaagtagtaaaacataattttggaattaaactgacatttaaagtaatcagagatacttcaacaacagttttatcacagagcttaatatgattccgatttcatggtgttgtgtgttacagaggataatagaacttatagaatgttttctttcatctggcttttaaaattatctgatttttgacataaggactagtaaacctagagttctgttaatagcaaacattgcctttgagtgctactactaaacctgaggcatcaagaagaaagaaggaaagggaagaagaaaaaaaagattaacaaatttgaagagtaaagagatactgaaataaggtgtggcgcacagctacaaccagtttttcattgtatttaagcagataattagcagttttatgttctattatcagaaaaaaacgatttgttttccttaatattaaaaatttttttttaactatttcaaacttagagaaaatttgttagaataacacaaagaactcttggctggccttgacccaggttcccctgtcgctgtttgctgtatcacgtgttctattctctgtttatttatagctatatttgtccacataggtacgtgcgcatgtgctcacatgcaacttgtgtgccacatgggaatttattccatttacgccagatgtgatgcccataaccctaaattcttgaatgagtatttcctgacaaaaacactttccaacatagtgacagtgcagcatccaaagcaacattcacagcgatgcagtactgccatctaatccggagacccactgaaactgaccagttactgtaactatgtcctttatggcacagaacaaagtcagtctggttcagtatccagcatttagttgtcatctcttgttagtctcctttattctgaaacagttcctcagtctctccttgtctttcatgaccttggcattttgaagaacacaggccagttattttatagaatgtttcctcatgattagattcaggctatacatttttggcaggaataccacagaaatgctggcctaatgatacctttttaaagtttcaagtagccacagcctaggtgtcctaatacattaaaaccacgcaaactcagatgatatggggatgtcaatctaaattacacaagccatttttaaagaaatacagttttgtcatcttcaggggcacgcattaccttgagtttgattaaagttgttgccaagtgtcctttgggaattgacattactaaatagataataatttgtactcagtaggtgacctttgtatgtaagtattactttgaacaattccccagtatcctgtaatccttatttacaataataatttgaaccattggtaagcagcggtagcagaccctttccaaattaagagcttcaaacttacgaagttttgtttgtgaggatacttaataaatgtcgagcagtaatgggtggcaaatagaactgacaaggaagtgtcttgggcagtttaaaaattttgccacccctttaaactgatacttttataaatatttgcttaaaatgttctaagtggtaaaagtaaaatgatgttctgttaagaaaatattacagcctgggcaacatagcaagaccctgtctctacaaaatatttaaaaattatctggacatggcagcatatgcctgtagtcacagctactcaggagactgaagtgcaaggactgcttgaacccaggaggttgaggttgtggttgcagtgagctgtgattgtgccaccacatttcaacccgggtgacagagtgaaaccctgtcttgaaaaatacatatatataggccgggcacggtggctcacgcctgtaatcccagcactttgggaggccaaggccggcggatcatgaggtcaggagattgagaccatcctggctaacgtggtgaaaccctgtctctactgaaaatacaaaaaaaactagccgggcgtggtggcggacgcctgtagtcccagctactcaggaggctgaggcagaagaatggcatgaacccaggaggcagagcttgcagtgagccgagatcgcaccactgcactccagcctgggcaacagagcgagactccgtctcaaaaaaaaaaaaattatacacacacacacacacacattatgtaccacttaatattctcaggagcagattataacataagcatttattaaatgtgattatctgaaccagacaataccctgagaagattatttatttatgagacagagtctcactctgtcacccaggctggagtgcagtggcacaatcttggctcagtgcaacctccgcctcccgggttcaagggattctcctgcctcagcctcctgagtagctgggactacaggcacgtgccactacacccagctaatttttttttttttccgagacggagtcttgctcagttgcccaggctggagtgcagtggcacgaccttggctcactgcaagctccacctcccgggttcacaccattctcctgcctcagcctcccgagtagttgggactacgggtgcctgccaccacgccaggctaattttttttgtatttttagtagagaccgggtttcaccatgttagccagaatggtctcgatctcctgacgtcgtgatctgcccaccttggcctcccaaagtgctgggattacaggcgtgagccactgcgcccggcccaaaaaatgtaaatcataagataaagcattggtttcttgtgaacagctacagctacttcatgcggggttcttttgttttagaacctgtgagttccacagatagttgctcctttgagaagctggctggcctggttgatcacatagcctgtagttgcaaaaatacttaacaacgataattctgcactcctaagaagttttacttgaggatgctgtcaactttgctgatagttttggtagccataaaaagaataagcagaaaacccagttaattagtaccgtatttctggtttattctagtgattgagttgatgtcaacagcccctgtcccttagtttaaatctgcttttgaagtagcttcctatggtttaattgccgaatcattttacttgaaaacaatttcttgttctgcttgtttgactgagtgtactgtctattttcacagtgttgtcatgactggatcttacaataatttcttcagaatgtttgacagaaacacaaagcgagacataaccctagaagcatcgcgggaaaacaataagcctcgcacagttctgaagcctcgcaaagtctgtgcaagtggcaagcgaaagaaagatgaaataagtgttgacagcctagacttcaataagaaaatccttcacacagcctggcaccccaaggaaaatatcattgccgtagctactacaaacaatctgtatatatttcaagacaaagtgaattagggttggcattcctagcagaagaacccacttcctgcttagttgagatagttgaatctagcattcgttcctataaaagagagaggtccattgtggcgcccctttccagtgtttgacagtgtgccattcgacaacacattgttatagctacatggagaaagctctgtggattcatcactgtggtgttctccatgtctgctagccatttaggtaagggtagggcacttttaatttaaatgacttcttgcaccatcttgcctaatggactagattggactgtatcaacattgatttactccactttttatgccttccattgtgatgacgtcaaacacagtgaaagccttcagtcatgctatgggatttaattgtgtatcctcattactgtatcatttgtggggtacaccccttccccctttttttaaattaaatacagctcattcttactgtggcttgtagcattcctcctcttctggcctcctggactgctccccttcatctcttacccttgccccctccacccggtcttggtggtggtatattaaaaaaagaaagaatgaaagcacacaaaatgagtcagtttggggtcagtggtataaagggggtatatgttgcaaacaaatgttttagtaacagttggctgtaatcactcctcgccgtgtctggcactgaaaataaggaaaaaaaacctactactgaataaaagtgacaaagaatggagaatctggttttctttttctttttaacctacctcttgtagccaatattttgtgtcatacctttgggcacagtgaaacaaaatgggttttcattgtttattggtatttttgttaattatttttaacaagtgttcttttacatgcaggaggagaggtattggttctctatgaacatattttgaatataggttttattaaggatttcacaatctataaatgctactagtttttttttttttttttaccatcatgagggtattggatacattgtgtctctatttaactcattatgtgttaatgaaattgttgtaaatgggaaccaaatttgtagaacttaatttctactttttagagtgcttaatttcatttttgccttactaaatagtcaaagacttataaaacatttttaacaagttagaacttttttgttattcagtcatataaaatagcagaaaactaacatcaagtgacactgcactaaatactttttttgtattttactgctatcaaatcagaatgaaatatactttaccatagatatttttcttctatttttggttttccaaagctatatgaaagacaaatttttaaaggtacagcgttcaaaaagtgcttaatgaactccaacagctgcctcaaataaaaatctgtatatgaatacattttccctaagcggtgatacattatccaaagatgaagagtgctcctatttttaataggtagaatgtacctttgtcagtcttgcagaaactttaatggagaagaaatggactttatttttgaaaggtgaaatgaacaggcatttatattattagagaatggtagtcttattttggtggaacataatgtaacaaccttgaatttcagaggactctgagtgcttctatgtccactacctattgttctattcttcaataatgaaaaagaattcaacgagccgaccgtgattccctctactacaaatattatgtcttgtaagttagcatttttagcacacaggagaaattttatgtaataaaattactgtatcttttggatttaacaaatttgtatttgaaacacattctatgtctgataattcttaatggcacttttactaatttatttggggatcttgggtacattcttaatttgtgtttattcttcacgcttgacttgcaagtgggatattcccctgccacaagtgtcaaacagtgatattcttcctgtgttgtgactggacagttttccagatcttttttgggagattttcctacagcttggttgtatgtcttgagataacaccaccaaacagctctcagaaattcttttttgattgatcagtagctatgatgattctcctccatgacactaaggattagtttatatatttaagagaaataattgctaaaattaaaatgcctctatcaaggaatgctattataaattattgttaacattctcaagtattaattttttaatttcattggtgtagcaaactctaagcccagccactcattttacatggccatggttaatctttttattaataaaaattatacttagaataaacttagtcttgtcaagttgcttgtatttcctattctcttgccactaatatacatgcacatactccatcacttaaccttttagaagagattgtgggtaggaaaaggactttcattctattaacctcttttgatctttacttagtggctgggcaataagaattgttttataaacctgtctaaatacatgtttatgtaaccattaactgctggatggtaagcttctgtgcagccctccgtctcttgggattaaaaaaaatgcatccagtcgggcgcggtggctcactcttgtaatcccaacactttgggaggccgaggtgggtgaatcacctgaggtcaggagttcgagaccagcctggccaacatggtgaaacgccgtctctactaaaaatacaaaaatcagccaggtgtggtggcacgtgtctaatcgcagctattccaaaagatgaggcaggagaattggcttgaatccgggaggcagaggttgcagtgagccgagatcgcgccactgcactccagcctgggtgacagagcgagacgccgactcaaacaaaaatgcgtccatgcactcttttcctttcaaaatgaagagaattttttaaaccttaaatgtgagttattctggttagggatacttctacggaaagctagagataggaaagcaggttctttcagtgtgtgacttttgagtaaggtgttaattaggaaattgtgcacatgtgaaagctatgcagtactgataaagaatttttagtgatatttaaacccttctaagggaatattgtttgagcatctttaccacacataaattcaaatgtagatagtattgtgcccttccagaaaaacaaaaccaatcccccccaaaagatggaaaagataggcatatgctgggtagtcaagaatcaagtcagtttacttgtgtatttgagagcacctgtactttagtatcttacttatctatctgttcagatggtgatagtttaagctctgcgtgtatgtcttactgtggttaaaaagggagttttatgcacctcctcttccccctcaaaaagccttgaaaaatgaccctgcttcattttgtaattatgcatgaagtcaaaacattacaactcttttagtattaatcaaatgcttagcgattctacagagtcttgaggtgttctcagatgccaaatatattttgtaactgagtttgcctcaacattttattccgtagtggtgtcagactggaacctcttacctctgtattagaatgaagaaacacccactttacaggcttaacgttaataagtctcttgctagctcagtgtatcaaagagaaggcactacagagcttagtttcctctaaaaggaatttggcaaactggtataaggggaaaaactaatatttgtgttttttcacatgttctactcatgctcctttgtaatctgaatagcaacaagttcttcgaggactttcccgctagagggcaatggtggggagcggtggctcatgcctgtaat

SEQ ID NO: 476 - DNA, 495016 bp, Homo sapiens
  source 1..495016: mol_type = genomic DNA
gtggccttctgcaaaatcatcactctctatgactggcagaagtttctgactctctcatgtctcctccaagaacactgtcccagtcaggacagaaatcttgcccagagagtttacaccttagccactttacttgagatgcctaaggcgaggctttccttgcaggaaaaatgagaaatactgagaaagtctcgtctttgttcccatgctccctcaattctgagacgtacttttttacattttaatgttcctgaaattgggctgcatctaacaagactgtttttacctaaggtgacagttatttccttgccaaaaagctattagtaaatggatagtagcttagaattgagataaaatgattctttcactattttttcctcctccaaagcaaattacacttgaaagtcaggacttctaatacatctgtaaactgaaagaaaatttccctttcattgaaaaactctcatctcaaaccatttaccctgcactaaatgggagttaggagaaatgagtcatcaagacagatgtagagatattaacccagaaccagttttctggactccacccatctactttcctaagtttataaatcctttgcatgcatttagtgcctttcctaggggtgtgccacatagaaccttctggaaatggctttctagaagttataaatctggatcctcaactggggaaaaggatgaaccatcttccacagcttcaagtggacttcattcacttcatgtcacagctgcttgatttccccacagttcatttctgtagaagagagccttctggtctgtttttccagatggcgagcttggggtgagttagaagtgcctgattggacttcacaactcagcgtttttattggctatttttgttctaggtacaatggaggttgatggattgttacttttggttaccaaaaccaggaggaggggagggtgctgcttaggagaaacacccaaaaagaacagaccagcctttctcagggactcaggggtggtggcactgcttccaacttactgcttcatttagaacaccagataataagcacccaggactcggcctttagaagtcaatggaataaataagctggaaaaggttgaagagaaaaaagccaaggaacatgtaagtagaagattatatggagccatttaagagcacaaaaagcaagagtaacaaggcagcagatggaatttggccccgcctggccctgccaagctcactctgggaagcactgtgtcgaaagtgctctctttctgtcccctgaagcattcaagttccctagccaaattctcaggctgtttctatggagcttacaaaaaaagagcatagcagggttgatgtgccctttccttgtcattctgcatcctcttctcagcttcatgcaataaatctctggcttaaatgaaattgttcaaaggaaaatggaaaatggaaaaaaaaatggtggaggggcaggagatactgactagttctggtttttcacaaaacaagaagaatttgtctaagagtaaacggtgtttattttttgttgatttttttcaatcaaatggaattgcttaattaaaaaaaacttatctcttttctccttaaatactacagacaacctcattttatcgcagcagacacctaggaacaaaacactggacccaccagagaaaactgggcaataaaagcatcagaagttcaagtcaactatggaagaattactgttagctggcagctttcaattctaaacagaagtgtcccaaacctattgggtttgacaaaagtttcttagaactggggagctgggaatgttggactccttttaattctattccaatcatttcctgtatagggaaattaaagtcaatgcatcaaatgaagacccaaagaaacatttaaaaacttgtttgactagtattcagtatgtgagattattaagtaataacttgtccacctagttaaccttgtcctggaatatatataggttatttgtagccgccactgctataatattttctgaaggatgccaagctgtatgcaagatctttttgctaaagtccagactgtcgacactgatctcgtcttttctccgcttgccccccacacacacttttcggggtttgaggatagcccggggcttgctgttttccctcgaagcctcaagggtcacatcacgcttggtgtttctgtcgaacatcctgaagaagttgttgtaggagcctgtcatgatgacactgcaaggcagagagcaaaggcaatgacatatcttcactgtcttttctttttggagcaaatgataccatgttatggccagcttatgacaccataggttttattaaaaacaaaaaccaaaaaatgagaacaggctctgcagtgtgattattggctttttgttttttttttgtgttttttttttttttttttgaatcactgaaagcaataggatttttggctgggtttggaaatgagggatggtgagaactctccttgtaatttgcttttgctcaatagattctttttgcttctttggctcagaaaaggtgtccactggttttaatgatcccagtcctacctacctcccatcaggaatgtgagactagaatgaggtttgtcgaagtagacacacttttgaaaacaataagcagttgtacgtgtttaaggtttggccactgtcaacagggttcctgggccgtctggcctctaaggcttcatggcatcagtgcagtgaggggagagatgctagtggcatcgtgcacgaacccggggcgcgacctctcccctgccgagaactagctctgaattcggcctttttagaaaacttatctacgaaatggatgtcatcatggtcttatctaggaaacaagtaaggaaattcaaattttaaaagaatctgggatggagaaataaaaagattttatatggtttttttcccacacttaatggacagatggtttccacatttttataagttatcccctcttaggcatagctgcaatcgatcaggagagtggcaaacacccaatgtcttccagaggcaaggtactgaatgtttaatggtgacatttcagacacggtgacaagctgaggtggggagggagagattccttgggccagggcaagtaccccaagtgccatcacacggtggttcccctggagtggggggctcctactcatttctgggtggagctctgactggctccttaagatgggagagcaggaactctcgtgtatttctcaaatgatttgggatgtgtagagaggtgaaggaaaaagctgacaagattgggccacagcaagggggatgtgtttttgggcacgttgtcacctgtaccaggtaaattaagcaaaggttagattttgttactctggctcatcaaactgatactgtgaactgtgtctgtgtactcgagtggactgttatcaccttgtcaggcagggcgctgagggctttgcctccatgatctcgtttcaacttctattatcccctaaaagggttttacagagaagtaatttgctcagtgtcacattgctaattggtggtaaagtccaccctcaaacccacatatggttgactctggggcataagtattcagccggttggcctcactgcttcccatactttgacgtttgcttgcccaccatgacccgacttatttttaaacaagtaagagattattttccaaaaaaaaaaaaaaaaagactaccaaccttatctgaaagagaaattaaacttcccagttgtgatgttatagaaagagtgttgatcttaggattcaaactctaaacttgttacttttgtctctactacttactactttatgaggttgggcagattactttatcttgctaagcctcagtttccttaactgtaaaatgagaacgatggaagcaatcttgttagactgtggttgggattaaataaaatgatgtgtacgaatgtgtttggtatatagtaggtgcctaataagtgtaatttttgaatcaaggctaagatagaggaaaaacttgagcaataataacagatatgtaaataataatatatgaataaataaatacctataaataaataataaaatgagagggctggcttctttttcccatggtggattttgttcttatgtcacagttgctttgctctctgtcctataccaactggtcagtgtgacttgggtcctttgccacgtggagactccttccaagcctgctaaggaggggattcattttggatcagtggcaaagaaagccaagaaacaggtggagtgtgagagagagacagttcatattcactgaaagcttgaatctctgaatgtcttgccataacagaatttctatgctttcaaacactattattggtgccaccttcatcaaggaacgaaatcagcccctggtagcttgcacttagttctcatggaaatcagagaatcatttgtatttgtcaaactaaaaatgaactattgggaggtattatgaagcactgttcaaatcaaaggccttaaaatagtaataaatcactttgagggaatgtgataaatgaggttgactagaattcagttaatgaactaccagggccgttggccaggtctccactagcagcttcaagggataatttttgatctggaaagcctacttggcattaatctgaactgttcaggctggaatttgctggtggataagtgatcttcatttaggcatgttgacctagtgctggaggtgtcttgtgtgaaaaagataggactttcttattaacattaaggtgttatctgtgccagttcagaaacaggattcaaaggccttactacatccttctcttctttccagccttgacttcaagggtcactaggggcccacattatgcatttcagccaggttttggggcccaattttgacctccctttggctgtactctacttaggataaattccctgagcctcttcaagacaatctttggaaggttcttcagccacagagcctttcttacctgtctgacccattccacacacactcaaatttatcaaaaatgcagtcattttcatagagggaacacagcttgctgcggaggtagtcatgaacctggagaggaaacatatcgagaaggtcagttattattttaaacagtaattatttctgcaaacacctcctcttctgatgtgagctgttaaatctttcattgtacatgctctttgaatcagatggccttggatctgaacctaggcttggcccttttagctgtaggacattaggatgggttgatgagcttctcatgtagatgatatggattaatcaagcttgcttgtatagacagtggcatccagtaagactaaataagtggtagattctcattttctaagctgatttgctcacaggcattagagatcaccattcatgcagtcttttattcaacaaatatttactgaatacctactacgcacttgagatgcagcagtgagccaaatatccttgcagtgcttttgacccagtgtcaggtgacagattatataaccaagtaaataaataagatgtttagatggtgataaaatcatagaacaaaagtgtatggaaaaagagcctgggagatcttgtcgggggtgtattattttatacagggcaagtagtcagggcttcactggatgaggtagcactggagcagaagcctgcaggagatgaatgagccacagtgatgtctgggtttggggtgaggggaaggctctccaagcataggaaacagcaaacataaaggcctagaggcaggaatcctggagggagtgtggtgggagaggagtgagtaagcagctgggggagaggatgatcagtttacataggccctttattctgaggaagaagagacctcacagaaaggattgctgaatctgctgtgttgcaatggatcctaagggtgcaaaggcaaagggagggagaccagttataacctgagtgatagattctggcctggaccagggcatgagcagtgatggggactggtcagattctccttttgtttagggaaagagcagataggacttgggtcaactctgaggtgtggagagaaaaacaggagtcaaagatgactccctgatctttctcctgagcaagtggaaggagtaggtaccatgttcacttttgggtacaatggtttagagatgtctacatgtggagctgtcgagtagactctgaggtgaaaggtgctgtcctggagtatgtggcgattctttcctggtttctcttttccagtgaaagcagccagcatggttatcaactaagagtgagcaggagagagaaagggttgagaaacagtgtcagatttctggaaggcaccaggggacacttgacgttgttggacatgtatgtcaaataaggctcatcaagcatagttgaatatttttctccagctacattcagcaactcagctgtagatgccaaatagatgaataaggttcagagagtagtagcctgggttctctgttttgaaggtaatccttcctgaacccactagcacggagtggcaataataacgggcatacccaatatgctggcttgtcattattagccaggtgctttatctgtcaaaacctcatttcatctctaaagccatcttatgatgtaggtactttcattctctttactttaatggagcatgaagcacagagatatgacatcatttgtccaagatcacacagaaaaagtgacagaaggggagggaactgagccccggtatcaggctctggagtgcacactctgagctgcactagcaacctgcctccagcttgctctggtgggtcctcagtccttgacaggagctgtgataatgaactcaagtgaggctgagagagaaggagatagaactgtgtgaaagcagagggaggctaccaagggcattggtgtttaagttaagagtgatgattcgatctcttttttcctgcaactgcggctctttctcttccttcgactccaacagttctgctggatgcagagcttcaggctcttagtcttgggcaaaggaacgaggtcaggctcatcctatgttccattagatgttctgggtatttgaaaagctctgagttatttggacagaggaagttatttctaactctgcaaattaattttcccccacctttactctctcacttccaaacagttccaggccttgtcagggtaacagcttcagtgctttggtgacaagggaatacccctacagcagtgctcttggcattgttaggtgcatttgggggctgcaagggtgaggctgtgtcctgcccttacagaggcatctctgctataaactaactcattcaccttcactagggggcacagcagtaaaggtatataaactgggcagtggcaaggtttttaaggtctagttccatatgtctgctttgtgatgaacctttcctcatctgtcaccattcaccttcggcattttgtcttattactcacctgcagtgtttctataagtgtcaaaacatgtgtgctttggaagtcacgcccattagcaggaatgacattgctgagaactctgtaaataattcttgaaagatagaagttgggatagattcaagggaaaacctagtctgaaccattatttctccaccatacctaaggtctgggtagctcctatctgcctccaattgacagcatttaaagaaaaagaatgtctactatgaaggtatgctgtatttatgttttgttgcacagaaaaaaagtcttcttaggcaaaccagagggacctttttctactagaggaaagaataaagtgagatgtatacatgagcaacctctagagcttggagcaagagagaacttaaaactcatcctatttgatgttctttcttcatgttcctagtatgacttttctatgatcctattaatttgtgcatgggattttggacgccagactgagtgtcccagtacagtgtttctcatatttatttgtgggagtccagtgtcatatagttagtggactgctatgaggcaaacaaagagccaactctattggtccgttcttatatttcaagtgttgacaaactttttctccaaagggccggatagtaaatattttaagctctgtgggccgtatggtctctgtgacagctactcaactctgccattgtgcatggaagcagccatagaagatatgtaaatgactgtacatggctgtgtcttaataaaatttacctacaaagacaaatagggggctggtttggaacacacgttgcagtctgccaacccttgttctatggaaaaacttgaaaatagctaatcatacttaagtctgcagccttttattcacggaaatgtgattgagatctgtgaatgcatgtatgaaaatgtataatagtagcattacctgtctccttgcccagggcaggcattattaactgatctttcattaactaatttctttcccactggacctcacaacctattaactaatttctttcccactggacctcacaatctatcatggtgttctggaggctcactgaatcagagtttgtttaccatcatctttaaattacttcacgtaaaagctagctggctgtgttctaaaactagctttgtcctaaatctactcttcctagttaaggctccccagcagccacacatgggtcctagttcccactgccctttcttttgcattaaggattcgaatcctgtaaggtttgtcttatgcagctggaagaggacactgaggtgactctagtcctgggctaaagatgaagggctgcaaatgaaagcttgggggcaagtgatgtggagccaagccctgaagtcgaggtaggattcaggagacaggaacactaaataacagggagtacgatggaccacaggggaaacaaagctatctccactacatatatggctgtgaattctggctcccaaacctttctccagccctgctggaacacagagtcatcaaagtcttcaacctcctctctgaacctttccttcttcttcctctgactggaatttggatctcctctgaagacactcaagtggtagctagaattttgctgtcactccacatgccagtgttgggtagctgggctccttgttgctccagacaactattcctatttaaagtcttcaactcctttgaagtcatgccatcaaactaagcttcctgctacctgtccttctttcagccatcaaaagttctgagtccctaatcctcatcccttgaagcaagtttgtatctctgtctctcttccattactattcctgccactatttttagttattcaggcactctagtctctctcttacatggtctcatctattcaatgtgttttgtcctttgcttccttggtcatattatgaaccttgtcattgctatccctgtacctgtcattgctatccctgttgctgttgttacctcctgtctttttagttcactccttctagtatgttgattctatcaattcttaaaattcattatttccccttttccctaccttcgattcagcagtacatcgttacaatcaatcactcctttagcatatatattcaacaagcttgcctttcttgctctctctttccattgtactcatttggcaaaactccatcactggttaaatcttactttctaccctttgtttacctgtaccaagcaggtgaatgtggctgggaagaaacataaaatcatacaggttaatttccctttaaagcaattatatagatttcaagtggatccctgagcaaccctaccaccctacaacatttctcttagatgagtactttaccacttttcttccttcccattcagctaatgaccttactacttattttactaaagaaaacacctacatgttcccatcacaaaattcacaaacctacttcatctatataagaaaactactctccttcctttgatagatgaattatctttgcatcttaccatctacagccaattctgcaatggactccatcccctctggcttcccccaagggctttgctccttcagcggtctctctctaatggtctctctctctagtggcttattcctatcagcagaaaacatgctgtaataacttccttcagccagaatcccatttcagctacccttccatttctctgttctccttcagagcaaacttgttgaaacagttgtctgtcctcataatgttcccatcttcagtttcttgaactcactccaattggacatttattcacactgctctactgctgttcctctgtcattcaggttactgataatctccacttactaaatccaagttcgtagtcttctgtacttgattcagcaaagcatttggcagttgatgacttatttttccttaagacagtttctctatttggcttcctagtcactcctctcatctcactggctagtttccccaaatctctcttgccaaatcctcttcctattctcaactaggtcatattttctgacctcttctttaattatactaattgtctagaagatctcatccagtcctatggctttaaataccctctacatacttgtgagtgtcagatttatatcttgaagctaaatatatccagactcacattgaagtgtctacctgctgtgtctgtttggatgtttaattggcttaacagagccaaaaccaaactttcgattttctcatctaaataacttggcaactctacttttctaattgctcaggacaaaaattttggagtaatccttgatgcttctttcttttcctgttatatcccgcatcaaatttgtcctcaagccttattgcttttaccttggagatatatcaagaatctggctaccttcattgctaatacactcatctaagctactattgccgcttgccagaatgttataactattctcctgtctcttccaatgtccctcccacagtttctcctccccagcacaaccagaatgttcatttaaaaatgtcaatgatgaaaatgatctggaattagataatggtggtttgtgagtaaactaagatcattgaattgtgcactttgaaaggctgattattatgtacattatatctcaaggaaaaaatgtaagtcaaatccttctgtctagaatcccccacttctttttatctaaccccaaatagcttaaaatagggttagtttatctccagcacttgatctttgctttcattatactcttgcttggacctggattttgcttctttaagtcctctctacttcaaagtctggtcttcctctttcaacaaaaccaccctatacaatgccttttcctttgtttccttgcatttacaccatccacccaacacttaaatccaaaacttccacacagtcttcttgattccctctccctgcacatttgatcagtaagcaaacctcactgactcttcatcctacccatccttccatctgcacgctaccatcaccagaccaaattgccatcatctcctcttatctaaattgtctgtttggcaaactgcaaagtgaaacacacagtaaaaagtaaaactcacaatgttatttcctggtgtaaaactttaatggtcctccattgtacccagtccacaggcaaaacagcctactgtatattaccagggcctagtgatcagccccttgcctctatctccaggctcatccttctgcctttgtgattcatattcaaggtgtaagcaccctgaacacacctcatttctcttgacaccaggcctttgaacacactgtgtttttaattattacactgtaagttctgagatacatgtgcagaacatgcaggtttgttacatatgtatacatgtgccatggtggtttgctgcacccatcaacccgtcatctacattaggtatttctcctaatgctagtcctccctgagccccccaccctctgacaggccccggtgtatgatgttccccttcctgcgtccatgtgaacacactattttaagagcatgcatttcctgactagttcatggcagttaagactcagtttaagggtcacttctttgggaaaacctttctcacctggctggaccatctcttgcagagaggcacactcaattccttgttcatcatctgacttttccaccagatggtaagctgcatgagagcaggaccatttgtttacctctatagtgtccattccacatgaagtgctctgtccatatcaattaaattgaattctagcctctccacatgtaccgttatcttaaatcctgtggcacttatagcctgtaccattttactgaatgtatcaccatgcattgccttccattttgctgcactgtaaacctttggaagcaggggctgacttaaaagctcatgaagggaatgttcaatatacctatgggtgcctggggttctatacctggtaagtctcgatggggcggttttccatgttgagatcccagactttgacggtcaagtagtccctggtcatgatatacctcccactgtggctgaacttcacatccgaaatcgaagagataatttcagagaaaaatgatctgttgcttggatcttccggctcttcaaaaactgcagaacaaaagcaaaacaagacaaatttagcaatccttatcaactgactctaacatgtttggactggctaggaagctgacagtgtaactgagagtcttaagtagggctggtgtctgcagaatgtaagttgctaatagagaactgtcatctctctggtagcggaaaaagctgtcattagtttctggattttaattctcatggaaggactggcatgggacccgtcccatcatagatctggcactgacagatctatgtatctaactctgtttctgtttcccttggtatctgggtgtcactgcacaaaatctggagtcatgttaagatagttaaaaaaatttgttttacagctttagtgagatacaattcacataccacaaaatgtagagttcagtagtttttagtataatcacaaaatcattgctataatctaaatttagaatatgttctttacctccccccaaaaactccatatccattggcagttactttccattccctgctcctatagtactaggtaaacaccatctactttctgattctcattctggaaatttcacataaatagaatcatagaatatatggtcatttgggactggctccttttacttggcataaaattttcaaggttcatccatgtcgtagcatgtatcaggtcttcattcttcctatggctgaatagtattccattgtatgaatataccacattttgtttatccattttatgagcatttgagttgtttccactttttagctgctaggaataacactgctatgattatacatgtataagtttttgtctggtcatatgttttcatttctcttgttggctcacggtgtttaatagtgaaactttggccaggtgtggtggctcatgcctgtattcagcactttgggaggcctaggcgggaagatcacttaaacccaagatttcaagaccagcctggataacataggaagattctattgctataaaaagttagccaggcatggtggggcatgcctgtggtcccagctacttgggtggatgagctactattgggccactgcaccccagcctgggcaacagatcgagatcctgtcttcagaaaaggaagaaataaaaaaagtggtgctttcttactggactgccttgggtctaagcctgtcatttacttgttgtgtgaccttaggcaagatacttctctgtgccttaggtttccttatatgtaaactgtaactatgatgtctttttaaaattaacaaaatttctaaatttgtataaacttaatgggtacaagtgtggttttgttacatagatatattgcatagtggtgaggtctggacttctagtgtaaccattagccaaatagtgtacattgaacccacaatgtcttttgtgtggattgtctatttgcactgatatccaggttcttattatctctctcaatagcttcagctgatttccacttacaggaaaaaggcatggcttctcagtatgttattggagcccatcacaaactgcctctaattctttctaccttgattttaagttggatgtatagagtatatctcgatatttcccacttctattcattgcctgattctttcttcactgatccaaatactctttgatgcatatacctcatctactacatattatttcaccccaaatgatcttttcttttctctgaagccctatcatgcttggtctggtcatttatttagtatttgctcaggtactctcttacaatggaactatcatttttcacattattattattattttaacaactgatgagtttgttttatctcttcaactaggacataagcttcctgagaacaggattttggtcttattttcgtattcagagtcttactcacaaatgttcaatgaatatttgttgcttcactggagccaaagccagataaattaacagattctttgccttctgggtgcttagcatgtatagtattcagctgaaacatatgcatttgctgacattcaattatttttgacctacaaagatggcaattgtgtatggctaaaccgaataagggtttatatcacaattttaggctgaaccaaacactggcctgcaggttgctgagttaacttatcctccaagactacttctttcctgcctgctcaatgcactcgcatagtcagtaatgaattctatataaagaacccaagtatataattaagttgctgaattaaaccgtgaactaagccaaaacgttaattttcacagaaccattgaagagaatagcaacaaaagccctgatcaatcagaattgaaattgcaaaaattttaaaaaaatcattgaaacagaaaaacatggcttattacagcctctgacccaatgtcttagtctctgccctcagcttttgggcttcggctgagtattagtgaaggcccctggattctgattggtatcttcatagttgagaactagataggaagaaaattttcacattagtttcaactaacagctatgtcattagtattggaggtttggaaattccaagtaaaacacctgatccagaggcagtaaagtggatgggcttagtaaattgtgctctggagtcatcaattcctgcctctgtcagttactagccatgatcattttatttactactccagctttagttttcccagctgcaaaaagaggagccacattgcttggcatataagcttggtacgcagtaggtcctcagtatatgccatcactattttcattttcagcatgcactgcttctgtgctggccagtcatatctcattcaacaagactcttgagaatttgggaccaaggagtacagaacctgcggactatttgaaagacataaagaatgtttacattttctcttctttaaactcaaatctattttataatgtttaaattgacaacaaaattgtatatgtttatggtgcctttcaatgttatacataggaatctgtttcccaaatacttggcatattgggaagccagtgcagcaacactgtaaagcctcacaatgacaccttcacaagatggatgtgaaatgaaagatgacaattcttcaatcaacctaccaccatttatttgtggagtgccggctttaggtagcacacagagggcaaggtacagataacataccagcacagcactttgtagttcatgacatatctatgtatattcaagttttaatagcagctccaggaattattttccttccttgggtaatagcatttaatagtattaataattacttttgatgggaagcttataatactgcaggccctgtgctttacatgttttatttcatttagttgttaaaacagcctatgaagtaggaattatgattcttcattttatatatgtggataactaaggcacagagaggttttataaccagtccagggacacactgagatagagctgcattttgaactcacatctatctgacttcaaaatctttgttcttaatcatgatgccatgtagaagaccttgctgagcattcatttataagttaagtgtcttgtatgcacaggcacacacacatgcacaatatagtatattagctagagtccacaagtaaaaagtatttcgatacgtgccaggccctgtaccaaatgctaaagacacaataatgaacaagacagatccagcactactcctagtgagctcacaggatagaggaggggacaaatgtttagcaatcacacaaatgtggttacagttgtgaataagtgtgattttactgtgttatcagacggaaatcatggtgctatggaactggctagtggaaggtaaatggaacaccagtgtgtgttccataaaatttacttctcatgccccctgcaatatcagagatgtgcaaaatttgttgaacaacagtatctggtgcctgagtgatagaacttaggacaaatcaacactagcctttctcctggagacccttggcttggcatgacagtagagaatctgctgacctgcaaggtttccaattagctaccagaaaatagagacattgagaggagagaggaagagaactaagggagagacaagaagagctttgctccctttgtaaggaagcagtcttggtgagaaacctgatagcccagtcctagccactgggggtatgtcaggttcaccaacaggagcgtatgtcttggagaccccaatagtaacagtaacaacaataatgacatttgctaccacttcttggtcctcaagctttaaatacattattgcattttaatgctcaaacttctaaggaaggtactatcactcttctcatttgtagataaggagacagaccaggaggaaaggttcagtaagtcaccaggatcatgcagctaggcagtggtagagatgggctcttgactctgcccatctgtcacaccacctccacaacagggccttgccttgctttgtcaatattgtttccctgttcaaacaagtcaaaccaggattcctcacattctagatataccttgtatagtcccactttggtgcctctgttgctcctcacctcttcctgtgcccatccaggtacactggaaagaacatcagactcagggatgctgggctggaatccaggctgggcacaagtccaggctggcttttgataatacctatcatctactgagcttttgtgctgtgtgctctacatgtattaactcactcactattcataggttttagtacttttccacaaattagtctaatcagtcaactcaggtacaactcacagctagtaggaacagaggcagaatttgaactcagtatacttccagcttatgttcttaacctctgtcctactctctctcatctgtgtggctttcagcaactgtcaactctctgaccctgtttccttctctgtaatatgaaggagtaagtgttgcctaccaggtccctcccagctgttggattctaaaatctatgaaattccactggcttttccatttccctttcctaatccccactactctaggtagcctttccaaagtgacttcagcaaaatgttcaacctgtgatatgtcaggcattccagattccaaagtcaaataagcttgggaaacctcgacaattttgggagttgacaacgcaattaccctattgttggggcattatagaatgttcagcaacatatctggcctctactcactagatctgccctgctgactccatctgcccacatgtggcaaccaaaatgtctctagatattgccaaatgttccccagggggcatgactgcccctggttgagaatcactgctttaatcctacttcagagtattatttgatcatacctttctccccactccattttatttttatttggcaaatcatttgcagctcagtgtttttctagtacaggcttcctcagaatacactttgggttatattgctatagtcaaaacaactgaatactgcctttaaaattccataggctatcttatgtgccttgtgtagacgtgttttctgttataacatgtacagatatgaatagatctccatggagctgtaagtatcttgtgggagccccctgaaagggctcagatgactgggtaaataaataaggttccagaatctggggaaaatcttgaattcagttattcaagaattcaaaaataagagaaagaattaagaagaagactgccaactttagagaaacctaaagtgaaacagcattcattacaactggagcaagggcagaaaggaggcatgcagtgagctggttgtggactctggggataggagaagagagagattaggtaaccacaggtgcaggctgttgctgggtgtggctcctttctcttgaccttacactggaccttcattaatttcacaggaactcatgcccatgtagaggggttaggaggggcccaagaccactaacagctgatcctgaaggcctgttcactctgtcttagatggtgtggtgactaacagtataggtggttccaaacacagtggcctgggttgaaactccagctttgctgcttataaatgatggagctttgaacaagcagcttgactccttccaagcttcatttaatggagataatagtagtacctatgttctagggcggttgtgagaatagacgagatcttgcttgtgaatcacttagcaaagcgtctgtacccaaaacaatagggaaggcagcagtaatgcagaagtaggcattgcttaaggcaagcttggtgtgcaatgagtccaaaagcctagtgtttttccgtttgaggcagatcttaagaaccagttgtggtactgatttctgggttttctgtctgggctgcgacacagacacatactagcttgtttctgaactatcccttgaaatacacctccttggtccaagtgtctctcatttcaatgtcacccccaccctggctgtgatgacgcgggcagatgagagtgagtgtacaggaaacaagccagtgggacatgagggtccgctcacgatgaaaaaggaacgggctcggaatcatgcgcagggctttaaattgctcacttttgctgacatttcttctacagggaagcacggctggcacgttcttccgtttggagacatggttgacaatttctccataatggggacacaactggcaattttcctacagagtgaggcagatggcaattttccttcagagacatgcaggcaacagttttgcccctggagagaaaagcctcgccgattgagatgcagccagtaatttttactatacagaagacacatccaataattttgcccagtgagagaaacggccaacaattttcccacagagggtaagaactccctcggactgacaatactggcctttatccagctgaggacagtgagagaagaggtttaagatttaattagtggctactgtgctaccaggggcctaatgacatagtctccagacacagattggagactgcaaatttagatcgtattaagactcagatgaaggattctgaattgggaaataatgaaaccaagttgcttaacccttgcagtttgcttttcatatagccctccattaattcaacaaacagttgtttgacagtgacactttaacaagacaaggcatacaatgcatagcgtgatgaagaatgaaaagttaatctagaagaaattatattggtccctaagttttacataacttttcaaaataattctgcatctactatacttcttttacaacatgtcttttaacaactaatcattcattcaaagttaagaaataatgaatcaaaaccttttcttttcccagacaggaaaaacagaccaaaaattcatagtggggagaagtgaggagcaaatgggctggtatgaccaagaaagacttaataagaagctgagccttaaatgatcaagaagcactggatagataagaggttagtacatattttagactttgagggccatctggtctccattacaactgtttaactctgcctttgtagtgtgaaagcagcatagacaatatgtaaacagatgagcatgtatcccacatgaaggctttgcatatggacattgaaatttcaattttgtataatttttatgtgtcataaaacactattcttttttgatttcttcaactatttgaaaatgtaaaaatactgttctttgctagagttgtaaaaaagaaaagttgtgagtcagacttggctgtatgccatagtttgctgagccctgataatggtgtttgaggggtaggagggggcatcctatctagacaggggaatcagcatgaataaatgcctggggtgatcaatgcatttttgtgggacagtgggcccctaggactggtagcaccatgagatcatgtagaagggctggaagatgagatttctgcttaaactgcaaatttctttcctaaactacatctctcaggatggtacatggaatgaacttaggagtcagacatattggggctagaacctgggcttcatcatctccaggttggattgtctttgtcagttttccttatcttgttaagacgcaacttatctttaaaatgtagacatcaatatcttatttgcctggttataaaaatgaaaagagataaaagcaaataagacatgtagcacaggacaggcatggtggctcacacctgtaatcccagcactttgggaggccgaggcaggtagatcacgaagtcaggagctcgagaccaacctggccaatatggtgaaaccccatctctactaaaaatacaaaaattagctgggcatagtggcgcatgcctatagtcccagctacctgggagaagaatcgcttgaacccaggaggcggaggttgcagtgagccaagatcatgccactgcactccagcctgggccacagagtaagactctgtctcaaaaacaaacaagacatgtagcacagtgcctggtacactgtcagaagtcaccaagcccatatcgaacatttaaagaagaactaatgtcaattctactccaactgttacaaaaaaatagaggagggaatacttccaaactccttctatgaggccagtattaccctgataccaaaaccggacaaagatatatcaagagaactataagccaatatccctgatgaatatatacaaaaatcctcaaaaaaatactagcaaaccgaattcaacaatacattaaaaagatcattcatcatgaccaagtggaatttatcccagggatgcaagacagttcaccatacgaaaatcaatgtgatatgtcatatcaacagaatgaaggagaaaaaccctcaaaaaactggatatagaagaaacgtaccttaaaataataaaagtcatatatgacagagccaccgctagtatcacgctgaatggggaaaaaactgaaagcctttcctttaagatttggaacacgacaaagatgcccactgtcaccactgttgctcaacatagtactgaaagtcctagatagagcaatcagacaaaggaagaaaaggcatccaaattggaaaagaaaaagtaaaattatccttgtttgccaatgatatgatcttgtatttgaaaaaacttaaatatgccaccaaaaaactattagaactggatgtggagccaagatggccgaataggaacagctccggtctacagctcccagcgtgagcgacgcagaagacgggtgatttctgcatttccatctgaggtaccgggttcatctcactagggagtgccagacagtgggcgcaggccagtgtgtgtgcgcaccgtgcgcgagccgaagcagggcgaggcattgcctcacctgggaagcgcaaggggtcagggagttccctttccgagtcaaagaaaggggtgacggacgcacctggaaaatcgggtcactcccacccgaatattgcgcttttcagaccggcttaagaaacggcgcaccacgagactatatcccacacctggctcagagggtcctacgcccacggaatctcgctgattgctagcacagcagtctgagatcaaactgcaaggtggcaacgaggctgggggaggggcgcccgccattgattgcccaggcttgcttaggtaaacaaagcagccgggaagctcgaactgggtggagcccaccacagctcaaggaggcctgcctgcctctgtgggctccacctctgggggcagggcacagacaaacaaaaagacagcagtaacctctgcagacttaagtgtccctgtctgacagctttgaagagagcagtggttctcccagcacgcagctggagatctgagaacgggcagactgcctcctcaagtgggtccctgacccctgacccccgagcagcctaactgggaggcaccccccagcaggggcacactgacacctcacacggcagggtattccaacagacctgcagctgagggtcctgtctgttagaaggaaaactaacaaccagaaaggacatctacaccgaaaacccatctgtacatcaccatcatcaaagaccaaaagtagataaaaccacaaagatggggaaaaaacagaacagaaaaactggaaactctaaaacgcagagcgcctctcctcctccaaaggaacgcagttcctcaccagcaacagaacaaagctggatggagaatgattttgacgagctgagagaagaaggcttcagacgatcaaattactctgagctacgggaggacattcaaaccaaaggcaaagaagttgaaaactttgaaaaaaatttagaagaatgtataactagaataaccaatacagagaagtgcttaaaggagctgatggagctgaaaaccaaggctcgagaactacgtgaagaatgcagaagcctcaggagccgatgcaatcaactggaagaaagggtatcagcaatggaagatgaaatgaatgaaatgaagcgagaagggaagtttagagaaaaaagaataaaaagaaatgagcaaagcctccaagaaatatgggactatgtgaaaagaccaaatctacgtctgattggtgtacctgaaagtgatgtggagaatggaaccaagttggaaaacactctgcaggatattatccaggagaacttccccaatctagcaaggcaggccaacgttcagattcaggaaatacagagaacgccacaaagatactcctcgagaagagcaactccaagacacataattgtcagattcaccaaagttgaaatgaaggaaaaaacgttaagggcagccagagagaaaggtcgggttaccctcaaaggaaagcccatcagactaacagcggatctctcggcagaaaccctacaagccagaagagagtgggggccaatattcaacattcttaaagaaaagaattttcaacccagaatttcatatccagccaaactaagcttcataagtgaaggagaaataaaatactttatagacaagcaaatgctgagagattttgtcaccaccaggcctgccctaaaagagctcctgaaggaagcgctaaacatggaaaggaacaaccggtaccagccgctgcaaaatcatgccaaaatgtaaagaccatcgagactaggaagaaactgcatcaactaatgagcaaaatcaccagctaacatcataatgacaggatcaaattcacacataacaatattaactttaaatataaatggactaaattctgcaattaaaagacacagactggcaagttggataaagagtcaagacccatcagtgtgctgtattcaggaaacccatctcacgtgcagagacacacataggctcaaaataaaaggatggaggaagatctaccaagcaaatggaaaacaaaaaaaggcaggggttgcaatcctagtctctgataaaacagactttaaaccaacaaagatcaaaagagacaaagaaggccattacataatggtaaagggatcaattcaacaagaggagctaactatcctaaatatttatgcacccaatacaggagcacccagattcataaagcaagtcctgagtgacctacaaagagacttagactcccacacattaataatgggagactttaacaccccactgtcaacattagacagatcaacgagacagaaagtcaacaaggatacccaggaattgaactcagctctgcaccaagcagacctaatagacatctacagagctctccaccccaaatcaacagaatatacatttttttcagcaccacaccacacctattccaaaattgaccacatagttggaagtaaagctctcctcagcaaatgtaaaagaacagaaattataacaaactatctctcagaccacagtgcaatcaaactagaactcaggattaagaatctcactcaaagccgctcaactacatggaaactgaacaacctgctcctgaatgactactgggtacataacgaaatgaaggcagaaataaagatgttctttgaaaccaacgagaacaaagacaccacataccagaatctctgggacgcattcaaagcagtgtgtagagggaaatttatagcactaaatgcctacaagagaaagcaggaaagatccaaaattgacaccctaacatcacaattaaaagaactagaaaagcaagagcaaacacattcaaaagctagcagaaggcaagaaataactaaaatcagagcagaactgaaggaaatagagacacaaaaaacccttcaaaaaatcaatgaatccaggagctggttttttgaaaggatcaacaaaattgatagaccgctagcaagactaataaagaaaaaaagagagaagaatcaaatagacacaataaaaaatgataaaggggatatcacgaccgatcccacagaaatacaaactaccatcagagaatactacaaacacctctacgcaaataaactagaaaatctagaagaaatggatacattcctcgacacatacactctcccaagactaaaccaggaagaagttgaatctctgaatagaccaataacaggctctgaaattgtggcaataatcaatagtttaccaaccaaaaagagtccaggaccagatggattcacagccgaattctaccagaggtacaaggaggaactggtaccattccttctgaaactattccaatcaatagaaaaagagggaatcctccctaactcattttatgaggccagcatcattctgataccaaagccgggcagagacacaaccaaaaaagagaattttagaccaatatccttgatgaacattgatgcaaaaatcctccataaaatactggcaaaccgaatccagcagcacatcaaaaagcttatccaccatgatcaagtgggcttcatccctgggatgcaaggctggttcaatatacgcaaatcaataaatgtaatccagcatataaacagagccaaagacaaaaaccacatgattatctcaatagatgcagaaaaagcctttgacaaaattcaacaacccttcatgctaaaaactctcaataaattaggtattgatgggacgtatttcaaaataataagagctatctatgacaaacccacagccaatatcatactgaatgggcaaaaactggaagcattccctttgaaaactggcacaagacagggatgccctctctcaccactcctattcaacatagtgttggaagttctggccagggcaatcaggcaggagaaggaaataaagggtattcaattaggaaaagaggaagtcaaattgtccctgtttgcagacgacatgactgtttatctagaaaaccccatcgtctcagcccaaaatctccttaagctgataagcaacttcagcaaagtctcaggatacaaaatcaatgtgcaaaaatcacaagcattcttatacaccaacaacagacaaacagagagccaaatcatgagtgaactcccattcacaattgcttcaaagagaataaaatacctaggaatccaacttacaagggataggaaggacctcttcaaggagaactacaaaccactgctcaaggaaataaaagaggacacaaacaaatggaagaacattccatgctcatgggtaggaagaatcgatatcgtgaaaatggccatactgcccaaggtaatttacagattcaatgccatccccatcaagctaccaatgactttcttcacagaattggaaaaaactactttaaagttcatatggaaccaaaaaagagcccgcatcgccaagtcaatcctaagccaaaagaacaaagctggaggcatcacactacctgacttcaaactatactacaaggctacagtaaccaaaacagcatggtactggtaccaaaacagagatatagatcaatggaacagaacagagccctcagaaataatgtcgcatatctacaactatctgatctttgacaaacctgagaaaaacaagcaatggggaaaggattccctatttaataaatggtactgggaaaactggctagccatatgtagaaagctgaaactggatcccttccttacaccttatacaaaaatcaattcaagatggattaaagatttaaacgttagacctaaaaccataaaaaccctagaagaaaacctaggcattaccattcaggacataggcgtgggcaaggacttcatgtccaaaacaccaaaagcaatggcaacaaaagccaaaattgacaaatgggatctaattaaactaaagagcttctgcacagcaaaagaaactaccatcagagtgaacaggcaacctacaacatgggagaaaattttcgcaacctactcatctgacaaagggctaatatccagaatctacaatgaactcaaacaaatttacaagaaaaaaacaaacaaccccatcaaaaagtgggcgaaggacatgaacagacacttctcaaaagaagacatttatgcagccaaaaaacacatgaaaaaatgctcatcatcactggccatcagagaaatgcaaatcaaaaccactatgagatatcatctcacaccagttagaatggcaatcattaaaaagtcaggaaacaacaggtgctggagaggatgtggagaaataggaacacttttacactgttggtgggactgtaaactagttcaaccattgtggaagtcagtatggcgattcctcagggatctagaactagaaatcccatttgacccagccatcccattactgggtatatacccaaatgactataaatcatgctgctataaagacacatgcacacgtatgtttattgcggcactattcacaatagcaaagacttggaaccaacccaaatgtccaacaatgatagactggattaagaaaatgtggcacatatacaccatggaatactatgcagccataaaaaatgatgagttcatgtcctttgtagggacatggatgaaattggaaaccatcattctcagtaaactatcgcaagaacaaaaaaccaaacaccgcatattctcactcataggtgggaattgaacaatgagatcacatggacacaggaaggggaatatcacactctggggactgtggtggggtcgggggaggggggagggatagcattgggagatatacctaatgctagatgacacgttagtgggtgcagcgcaccagcatggcacatgtatacatatgtaactaacctgcacaatgttcacatgtaccctaaaacttagagtataataaaaaaaaaaattaaaaaaaaaaaaaaagaaaaaaaaaactattagaactgaaaacaaattcagtaaaactgcaggatacaaaatcaagatacaaaaatgatctcaacagcaaataatctcaagaaattaaacccatttacaacagctacaaattaaaaaccaaggatttaacttacttacccagagaagtaaaaggtctctacaatgaaaattaaaaaacactgatgaaagaaaaggaaggggacacaaaaaatggaaagatattccacattcatgaattggaagaatcaatactgctaaaatgtccatgccacccaaagcagtctacagatttaatggaatccctatcaaaataccaatgactttacagaaatagaaaaaacaatcctaaaatttatatgaaaccacaaaagacccagaatagccaaggctatcttaagcaaaaaacaaaactggaggaatcacattacctgacttcaaattatactacagagttacagtaaccaaaacagcatggtactggcataaaaacagacatatagatcaatggaacacaagaacccagaaacaaatctgtatatctacagtgaactcattttcaacaaaggtgccaagaacatacactgggggaaaagacagtctcttcaactatttgtgctagaaaaactggatatccatatgcaaaagaatgaaactagatcccaatcactcaacatatacaaaagtcaaatcaaaatggattgaagacttaaatctaagaccttagagcatgaaactactacaagaaaacactggggaaagtctccaggacattggactgggcaaatatttcttgagggataccccgcaagcacaagcaaccaaagcaaaaatgaacaaatgggatcaagttaaaacatttctgcacagcaaaggaaacagtcaacaaaatgaaaacccataggatgagggaaaatatttgcaaactacccatctgacaagggattaattaccagaatatagaaggagctcaaacaattctataggaaaaaaatatctaatccatttaaaaaaatgagcaagtgatatgaatagatatttatcaaaagaagacatacacatggcagataggcatacaaaaaagagctcaacatcactgatcattagagaactgcaaatcaaaactacaattagatatcatctgaccctagttaaaatggctttcatctaaaaggcaataatgctgatgaggatgtggagaaaagggaacacttgtacattgttggtgggaatgaaaattcgaaaaaccactatgaataacagtttcgagattcctcaaaaaactaaaaattgagctactatatgatccagcaatcccactccttatgtatataccccaaacaaagaaaatcagtatactgaagaagtatttgcgctcccgtgtttgttgcagcactgttcacaatagccaagatttggaagcaacctaagtgttcaccaactgatgaatggataaagaaaatgtggtacttatatacaatgaagtactattcagccatgaaaaagaatgagatcctgtcacttgcaacaacatggatggaactgcaggtctttatgttaagtgaaatgagccagggacagaaagacaaaccttgcatgttctcacttatttatggaagctaaaaatcaaaacaattgagttcatggagatagagagtagaaggatggttaccagaggttggggggcagggggaagtgggttaatggttaatgggtacaaaaaaatagaaaggatgaataagaactagtatgtgatagcacaacagggtgattatagtcaatattaatttaattgcacatttaaaaataaaggagtataaccagatcgtttgtaacataaagagtacatgcttgaggtgatgaatataccgtttaccccaatgtgattattactcattgcatgtgtgaatcaaaatatctcatgtacctcataaatatatacacctctgtacccataaaaagacgtcaacaagttctagtgtcacacaccatttaaacaacaggtattgagtacccagtgtgtgtaaagcactatgataggtgctagagttacaagagtgagcaagagatataccatgcctacgctccttcaacaaagagtggggcttcttatctaccatggctggggcttcctctcatctctctctctctctctcttttttttttttttgaagcagagtctcgctctgtcaccgaggctggagtgcagtggcgcgatctcagctcactgcaacctctgcctcctgggttcaagcgattcttgtgcctcagcctccccagtagctgggattacagacgtgtgccaccacgcccagctaatttttgtagttttagtagagatggggtttcaccatgttggccaggctgtctccaactcccgacctcaggtgatccacctgccttggcctcccaaagtgctgggattacaggagtgaaccaccatgccagccatctcttgctcaattcccctgtagtaggcagaataatgccattgcccccatccccaaatatgtctacaccctaatccctagaacctgtgaccacgttatgttacatgacaagggggaattaaggttgctaatcagctaaccttaagacagattacgttagattatctgagtgggctcagtgtaatgaccatggtccttataagtgaaataggaaggcaagagggtcaaagtctgaataaccgtatatgagaaagacaagactggtcaccgctgtctttgaagatggaaaggtgccatgagccaagggaggcaggcagcctctcgaagctcaaaaaggcaggtagccattctcccctagagcctccagaaaggagcacagccctgctgacaccttgactttagcccagtgagacccacttctgacttttgacttccagaactgtaaggacgttaatcaatttgtgttattttaagccactaagttcattaagtatgtgataatttgttacagcagtgatagaaaactatcctcctccgtttgtcaacaaagggagggctcaaagttcatgaattcccccttcaactctgcaaagccgctgttattatttccctgcaccccagggccagttccctttcagcagctgcccctatacagctggacagggaaggcaggccagagcgggctgcttctgggcagaggccatgagaggctcactgtccaagggagctggtgaaccccagctcagccactctttcctcccagcattcctgatgctggtgctgtacacccataagccgacacagttcagagaaaccagaacccagcggctgcaaaggcagagcaagccaaactcctcagagacatcagggcttagcagcagaacatgaaacgaccggcaatcctaccatgtgctaaatatttgaatcttcccaaagcaatgccactttgtgctcagacatctacagtgactctgtgtggctgatagccaacagtcctacccccttgtcctggttcaggggctccatatcaagccctaggtcagcattccaatattactctctacttcattctgctgaaatgctccattgaggtctgacccatctactactcatttgcaccagagttgaataactcctacctccagggtccaggcaggtagtgaaatagatgacacattcatgggtagcaatagggaacagtagggactgtggcaaactagagtgtccacaccctataaaaggggcagtttccacctgaggtcagcagttcgaagccagcctggccaacaaggcaaaaccccgtctctactaaaaaaaaaaaaaaaaaaaatacaaacattagctgggtgcagtggtgtgtgcctgtaatcccagctcctccagaggctgaggcaggagaattgcttgaacctggtaggcggagattgcactccagcctgggtgacaaagcaagactctctcaaaaacaaacccaaaatacaaacaaacaaaacaaaaccataaaggggcaatttccactctgctccggctgaatgcagccatgcagaaatggggctccagcacagccagactaatttgtaaggcctaaattttttgaggaactctaattttttcatgttagcaactaactaaagaaacttgagcgtgtgatcaaacatacgtcctctgtaagctatgcaggccacacctgtgacctgattaactccctgcagtgatgatggtgatgtctgtggtgcactggcatgtgctggggctggatccatgctccttccctaacctctccctgctcccctgtttctctggctcctattcaaccttcagggctcactgtctttttctagaaaaacttcctggacaatcttggcccactgcatcctttcttccttactggttaatttggccaccttctaatcttcctcctattatttttaaatattatctgttcaggattcacaatgagttaaaaaattttagttagggaattggccccacagaaaggcaacaccagtgacaacaagagcacctgttacctgccgggcaccatctagggtaagaattatctctatattatggctgaggaaacagaggcttggagagatagggacccaaaggaccatatggtctctgagtgagcccagcattggaaggctcattatctgtggggttagaactttcttacgaaggagactcagctggaatctgatctaaagaaaggggaagcgaaaacctgtgtttggcttagggttcgcctgtcaatctaaagactgaatttgggctaatatgtacagacaagttcattaattgtgggtctgtttgtctttcttttgtgaggaataatcatttattagccaagcgggactggtgcctttttgagaactgtcattctggaaagatattgattgaaggaggcctctgagcacattctctccagcaggcagccgtaagggaggcggctgcagtccagacaagatgatgagttggcagtgagcatctcgacaggagcctaatgaagaaatctggtaacagcgagggctggctttatgagcgctcatatttggtctttcactctctgcaaggttggtgagtggcaaaagtgtccatgggcctctacctcccactgtggaattacacattcctacagccagtgggctccgggaacccaatggcagcatccccaggcccctgggcccactccacacatcacaggctagagacttcttgtctgcctcctttctcacgtctctccccctgagatagcatgctctcccctccctccttccctctcataatttgttcccaacaggtagctttgtgcagttactccaagagaagcccgaactccctggggagcctctgcccaggtggaagagctctcgagtggctattattaggggtgattgctgggaagctggttgccatggcaccgcagaggccagtgctgaactcccaagctgccccgtttccaaggctgtctacataatcactgcaatgagaggcacaggcacagaaagggagagaggagcagctccccactgacagtgatctccctgcagagcaaggtgagcagttcacagctgagtacgacagcccatcttggcatgggccaagcactgcctggagggaccctggtgtgagctggtcactgcttcactgtcttctcatggatcaggcagtctgcctctgtgttcccagtactggttttctacaggaaaacactgctcctaatccactgatccatttcttaaaggttcctggagtttgcaaacatcgagtagtgatagtcttccatctgccaggcactgcgctaaactctttatggagacaaagaaatgatgctcagagagtcatttgcccttggtcacaggctaagaagaggcagagctaggacgtaaacccaactctggctctatggcatctcatatagcatcatttttcctccagtcctctgactagaaagggtggccccttcaacctggtgctgagaacagacactggcggccccacacctctgaaggcatggttccagcaaatagaaattggactggcaaggattaaaccgctggtttgggcttcattagctatgtgatctcaccaaccacagagaattaaccagagtggagccatctctttacagacttaacacaatgtaccgaggcaatgtggagaacagtcactgaatttattgagcacctactacctgctccagacatgccattaacacgtgggctatccttcccttccacagtcactctagaacttgaggccactgtcctctgatgcagagagaagaaacattttataatcactgtagacaataaaggctttatctgttagcaagcacttttgcttaatgacttggtcatggggaaggagagacaggttgtacttggtcctcattttgcacttggttagagagtaagaggcctttccatctccactgctgctcaggtacttcctcccagtgtactctagcactcccccagcaggttctgtagaaacacagaccccaaggcctgggcagactctaccagaaaaatacttgtgttcctctgtgctctgcctagtacatggcttccctggctacctctcctacaggcctggggaggcaaagatgggaagtgtttgtaggtattatctactgacaacattcaactttagacctcggttcaagccccctctacctttgcctagatctttgactttgtgtaaacaacatgctttttctgggcccaattttctcatctgtaactccaagtttatgaattgttttgataataaaatactaaaaaatattgagtgtttgctgtggaccagacatttcattgaatctgcacaacaatccagtaatgcatgtgccattattgtccccattttatagaggtggatacttagctgtacagagggtaaatccaaggagttaagtccaagttacccacacctgggcttgtctgaccccagaaccagcactattgaccactatgatatacagcctctttctatcttcattaaagccaagtttccaagccacaggaatctcacaaatacctataaccggcctttataatttatgaacctcaacagagtatctgaaagccacctagtggctggaagttgctcagtaggatttgaaattctctaaaaggcaaaattgttcccatattccaggctctgctccctctcccccttccaccaccccttgatattctttctgaaaagttgagttggaaacaatcactttcttctctgaacttctatagagcaaggttcccaagttgtgatcaagacacaaaagtcatggggcagagcaccataaaatattgtgacattatctttaaagtagcttatatataactcagtataccattttgtactggggtctattatatagatcatacaaatttcaggaatacttccaggagaaaagtttaacattgagacaattctgagttttagcttataattcatagccttagtgtattctgagatacatatcaccttttatctgatgttagatctcatctcattcactcatacattcaataactacaatttagtatccatgaaatgtcagggatggcccttggaatcttccggtacttaataacctccctaggggcaagcaacagtacgttggattaacacaaatttgtggttttgtggccccacagtgacacgaacacaaaagattctcaataaacagaaactgaaaaatgctacgcgtcagaacttttgggtacacataggatatgctgaggataagaacatttgaaatcactatttcaactgtctaaaacaatattcagcataaacactttttagtcagcattttctctttctgattatgggaatctaaatttcatattcaattgaaaatgaactttatattagaaacatttcataattttatattctcttgtcccaccacgataagtgtacaaaggcagtaattgcataagtctgtctatccattgtgcttagcacaatactttgttaacacttattgaccaattcattgctttgtttgatttcagtctttttcctaagcttgatgattctatttttctcatatgtaactcttcaatgacaatttcactgcattacagacattttcaaatggcacaaaaaatgtcagaatatgctatttgaccctgggattaaggatgcccatacatgagatcaatcctatttaaatccttatgctcaggttaaaaagagaagataaaggcaagtatcattatgagcttcgtggggatagcattcccctgacctctgctgtctccagtctgtgcttgataatgatggaaggccagcaggtgctttgagtaattcagcagataaagagacttgcactgatggggctggaagctgcttgagtggacagcagatctcacaattcagttactgatgctacctactgagctgtcaaaatagaattatgagaactgcatggggggcttgaattaaccgatatacttaaacatgagtcaattacacacacgagagatccccccttctccatcttacagggccatgcaagtcgtgaggatggttgtattcattatatgatgtaagaaaaaaaaccaatcattgtcagtgtttcagacttaatgttttctaaaccctgatttcctcagctgcaaaaaggaagagatactgcaaacttactgggttttcaggaggatcaatgaagataaatcaatgagaaggggctctataaatagcaaagggctaaacagcaaaaggtatcaacttttatcattttatgcctttttaaaaacataaatctgagagtccacagaatttgtaaatttcccctgcaaactgttgttgtgaactcgctctatggcaccttcatctaggtgtgtgctcaggccaaaaagctgggagctgtccttggtgctttcctttacttcaccctctacatcttttttttaaaaaaacagttctattaactttacactcaaagtacggcccaaatcaattcaatctcaccatttccactgtcaccatcttagtctaagccatgctcatctcttacctggagcactttgatagctttctgactcttctcccagcatctactcttcctcctgaggcttcattcttaaatagccacagagtgacatattaaaagtataatcaatcatcctctttacaccaagccctcctggattttctcttaatacagcaatatccaaactccttaccattgcctacaggtctaccgtgtggcccagcccttcaagtcctttgcacagaagacaatgtgaatgggggctgtgtggtgcaaggggactgccctgtatgtagctcttcctgcctcctctcatgctattcctccttatggtactgtacacagcccagctggtcatctttctgccctgtgacctgccaagcactgtccagattcagagccactccatttgctgttgcttcttcccctgaaacattttcactaaatctcaatcttatttatgtgtgtgttgttagattccttctccttcaataaagtgctgcaagggcagggggcatgattttcctagtgcctggaacagtgcctgggacatgtgaagcaacaataaacattcgttgaataaataagtagcagttgattacctttacttcatggacttctctttcttttactttgcctgcaaacaccaaaacttatgttctagttttccaatttgtaaaaatattgcaacttttaaaatcttattttgtgcttttttattgccattttcccacttgtggtgcctaggaatgcgatttaattttaatgttcatgtaagttaaatataacaaggtaggtattttattatactgtgtgtgtgtgtaatgtattcttaatgctagaaatgagcaaacagtgggtcaactactctttactgttggcttttacatatgtgtaaagagaagtatcagatgcaaatttatcagattgaatgactatagttgtttacctctaaaagcatttctttagcactttcactgtcctaaatgctgagggggtttgagaaaagagtctagccataataatggtcccatctagtgagagagaccaaaatagaaagaggtaattaaatgtatggtattaagtgctctgagacagggcatttaatcctatttgggggtccaggaagtcttcctggaggaatgtgccttaactgaaacctgaagaatgtgtaggcagaatgatggctccccaaggatgtcaaaatcctaatgcccggaacctgggaatatcttaccttacatggcaaaatggaataaagattgtggatagaattatgatgctaatcagctgaccttaaggtggggagagtatcttggattacccaggtgggcccagcgtaatcacaaaggtccttaaaagtggaagagagaggcaggagagagacagagagatgtgatatgagaaggactcatcttcctgctgctagctttgacaatggaagaaggggccattagccatggaatgtgggcagcctctgaaagctgaagaaattgaggaaacattcccccctagagcctctagcagggaacacaacttgatcaacaccttgattttagacagtgagaccaatgtcagacttctgacctgcagaactgcaggatggtaagttagtgttgttttaagccactacatttgtgagaatttgttacagcagccataggaagctaatacagagagaaagaggtgaactttgatttcactgtggaggggaaaaacgggcagctaatacagagagaaagaggtgaactttgatttcactgtggaggggaaaaacgggctgttggaagatctattatatataaagattgtatgataaaattcccaccttgttatgatacttatatgaatgttaaaagattaattccttggcaccacaaatggaaaaatggtcataaaacacagacttagattttaaaagttgcaacatatttataaattgaaaaaatggaagataatttttggtttttgcaggcaaaatacagggaataggaggccagtgccctccctaggctctaacaggccaatgcctctttctggggaaaatatttctgggcatttccttgactgggttctcctgaacctagaattcaggatgcccccaggtgcttgtggctgctttgctagtgatagcttgttacagggcatgacgacaggtaagttggcctaaaatgtcccaaggccagagccatctataaccctatggccaatctttcccattctgcatgtcttgggggctgcagccatgtgtgggagccaattttgaccttcactgctgtctcattcaagaccccaagtgagggagagggcaagacctgggaaggtgttaactactaatgaataacactcacttccaaaattaataagccttctggttcttagcaaaatccactcaactggattctccaggatgactaattgacagaactggttaaattaatcaaaaatggaaatgaggatggaagaagggggaagggattctatttttattcgatggcttgggcactgcctgctctgttaattgctgctaagcttgaatgggatagagcagcttcagacatgggggtgaggtgggggtggtggtggtatcagtgaattctgctccttgcagcaaggcttttggcttttctccagagtgggaagtgtgtgtctgtgtgtgtgtttgcaatcctgccatcaggcaaaagcattttaataaaggaccttgtctttttaacctaaccaagctcccctgaaataaatactgttaattatacctcagatcaatactgaaccccttttggaagatatgccaaatctcaggggctttaagattcattgcagttgctgtctcagctgatgtctttggacacattccatcagggacctggggaatgagccacaggtttattagggagctctagtggcttacttaccaggggttggcaattaagtttgtagatgagggtgaagaatgagagtggattttatgttctgtgtaatggcagaattaattctatggttgaaaatggtcaggctggggaatccagccagatggggattgtataaaatggactcttgtgaaattatccttctggattttagaaaaacatcatgctctttatcctgtcagatgcccagcagaggaataaatcttctggaagcagacctacatgggttcaaatcttaggtcctccactgtgatctggggcaagtttcctcacctctctgtgcctcatctataaattagaggtactaataccaatcttcatgggttgttgtgagaattaaatgagatacagaaatgttcaaaaatagtaccctccccctctactacacccacctttggaggacaatgaaatttctgatttgcattgttggactgggcatcaaactttgccttcttctcattggaactcgggctgtttctccaatgactacactgttcacagaaacatctcagatttttttttttttgagatggagtctcgctctattgcccaggctggagtgcagtggcacaatctcagctcaccgcaacctccacctcctgggctcaagtgattctcctgcctcagcctcctgagtagtggggattacaggtgtgcgctaccatgcccagctaatttttatatttttagtagagacagggtttcaccttgttggccaggctggtctcgaactcctgacttaaagtgatctgcccgcctcagcctcctaaagttctgggattataggtgtaagccactgcacctggcctaacatctcagattttaaggtctaaagtgcttatgccatttccccctcagcatgaaaaagtcagactgcccctggacaggaaggctgctttggtgtcatccgaaggaggggatttctgtggccaatccttgggctgcagacttgccaatgcagaagggccttgctgctagaagagagtgtctacaggcagtggacttgctggtagagccagtgcaaggattggtgctgcagggcagccccatcgctactgctgaggtgaaccctggctcctcaccctggccctcaagaccttctctggccagattcagcttctgcaattccccagcactagacattacctctcaataagatggaagctcgaggggcaggtgaggaagaaggaaggtctgcccaaaccacaatggaattaagatgctactgcagaacctaccctgtgccaccacacacaagattgattgcattcagcaaatgtgtactgggaacctactatgtgtcaggcagtgtgctaactgcttttacttaaagtaactaattaatggacaaagacttccataagcccacatcccatgatcacttcacccctctcatctttcttgccctctcagaagcatttgacataattgatcctaatgtatttctaaatcactgtcttctctcagcttacatgtgttggttttctgctcacttccctggtagctcatacttgatcatctgtaaaaagccacctcctcctttcccctaccccattggtaaatgtcggtgtggccttcacctcattcctgggccctcagttattctctatccataccttctgccctaattgacattatcccatcccatggcttaaaatagctatgacatgctcgtgattcctaaatttatacctacagctcagacctctccccagacttccagactcatgttatctaattgtctgccagacttctctaattggatgaatcacagacatctcaatctggacacatccaaaagagaatgcttggtctttccatgccaaaactgttccttccccagtctcctcgtttcagtgtatggtaccgtacagtaactcaagcaccaaacctacgagttatcttagattctcccttttccatcacctcttcactgccaatctctcagcaagtcctcttagcctcacctcctaaggtgatcctgaatctgcccacttaccactacttcactgtgcccaccctggtcaaagccattatcatgtctcctccagacagtggcaacaacctctaaatggtctctctgctttccaggcctggcaccccttgtctgagaactcttttaagatcataaacagtattcacttccttcttagcaccatctcatggtttcccatctcacttagagtgaaatgcaagtgctctgctctggcccataaagctctcaatgatctagacccagcctacctctctggcttcactttccttttcccctccctctctttctccctccctctcttcctcccttcctccctccctccccttttcttccttttctttcctttcccctttcccctttctcctttctttccttcccctctccctctccctctcccttgccctctcgtcttgctctgttgcctaggctagagtgcagtggcacaatcttggctcactgcaacctctgcctcccaggttcaagcgattctcctacctcagcctcctgagtagctgggattataggtgtgtgcaaccacacccagataatttttgtatttgtagtagagatggggttttgccatgttggccaggctggtctcgaacctcctggcctcaagcaacccacctgcctcagcctcccaaagtgctgggatcacaggcataagccaccatgcctggctgtggcctcactttctatactgtccctagcctacttgtatccatccactgatcttttttctctattctttgaacacacaagtttcctcctctgttagggccttcacacttagatgttggctttctctttggatccgtctgataacaggtcttaattcaaaggctttgccacataccactacttcctgaccctgctaattttcttacagcttttttatcatgtctgaaatgacctcggttatttgtacatttgtgttttctctcatccctccccacaagaaagtatggtccttaaaggcagaaaccagcaggtgtttaatcaatcttagttgaataagtagtttttggtgttctcttgaagagctacaggtggtctggctcaaacctcaacttcatcacttgctctttggtggccataagtgtatctttcccccttttagctagttgcctcatctctaagatgtgaataatggcagtatgtacctcatagggttgttatcaggattaaatgagctcatgcatgtatacttggcttacttcctggacacagtaaaatgtcatggaagttagctgtgaatacggctgttgacattactacttttatgattgcttctgctcttcctgctcccacacttaaaagacacatgtggtagggaagcaagacaccatcttcactccaaccataacacgatgcttatactatgtgccaggcatcattctaaggctccacgggtgttatttaatcctcacaagcaccctataaggtaaatactttcatgacccatattttataggtgagtaagttgaagcacagaggttaggtaacctgctcaagatcaccaattaggccatggatacaagctgatagtggctgctcaactatgttgatttgcctcccctgttttgacccagtccctgaattcactcactactgtcagtttggtttgacagaggggaagaaacaaaacaaaattgtcctgggctgtgcttacagggaacatcatgctgggctcctcaccgccttgcctcatcccagtacctatgacaggggctgctggggtgggcagggagttttgatctttcctgctgtctccaccctggaggtaaggcacccggtggggctcttcagtcattcatcaactttcttcaagttatagaagtaaaacaacaaccttggagagaatctagaaaataagagaactgcccacatttcatggcccctgacctcatccctttcatatagcctctgctagtctttgtccacatatacttatcctgaccttgctgcattcatggtgagattatcatttcgcatgctgctttaacattcataaacatctctccacttgctccatctctgtgtccccaggtctttggcaagtcaagtctctgtggcctttcaaggtatcacttttactattcccagtcccacttgaggatttcacctgctgcttttatgctgctaaaccacaccctacttattggggaacctctcccttcaagactggcttttgaataggaatcaggtacctcaatgcctctaaaatcaattaaagtctgctttgttcagaaagaaagtgttctagctccacaggaaagcctccaggcatcactgtcctaacacacacggacaacctgcctggtgaaactgtcgagacccaatgcacaggtttctatcatcctggtcctttggtcctttgtctagtttctctcctgcctttaataaaagttatgctcattgtgtgcttccaatgtgtcaggggctgtgcaagagccctgtgtccatgacctctttccactcttacctcctggaggaaggtgtcaacatcagcacctgcccaggcttctggcggcaatgaggcctggaaacaatgtctggaactgctggctccagggcttgtgttcttgatgacttttatgtctttcctcctactatgggctgagttgtgcccccccccccgcccattcatatattgaagtcctaactcccagtactgcaaaatataactgtatttggagatagagcctttcaacaggtaattaaaataaggtaatcagggtgggtcttgatctaataggactggtgtcctcataagaagaggaattttggacacagacactgatggaaggcagtgtaaagacacagggagaagacagccatctacaagccaaggagagcagtgtggaactgatccttctttcgtagcctccagaagaaaccaaccctgccaacacttcatcttgggcttccagcctccagaactttgaaaaaatagttgaattgtttaagcagtgtagtccatggtactttgttgcagcagccctggtaaaccaatatgtcttttttcacctgtcttttcctatctgcctgcctttccaccacagatgttctatgaagccccaccaggtgctatgtaagtattgtacaaattcagtaattagtgagataaagtccctgtcttcataaagattgtattccagtcagcaagacagaggctaagtaaagcaaacaactataatggaggctatgaaagaaataaagaaatagagtgatgagattgagagatggtaggtgcagatggggtggacagagaagttaactcttaggaagtgacattttctcagaaacttaaaaagtcagtacaggccagacaggtagagtgtgtggggggcagggagaattccaggcagaaaagcatgtgcaaaggccctgaggtgggaaagggctggatgtattggaggtgtaggaagcaagccagtgtggccaggctacagggagctgagcctggaaatgttggcagagaccagatttacggggcacgttggaaaggagttcaggcttaattcctttcattccccaggttggtgtccattacacctggccagtttcttcacccagccaccgatactcatgcgtggaaaggggaaagaataatccactctagctaagtactgctgccatcagcaccctattgtttcagacatctaaactgcaaacaaagccctgtcactaccgccagaagtggtagaaaaaaataggcgagggagaaaaggaatcatcctttccaacccctgctgagtatgcagagtgagggacatatggaaattaataaatgcagctctgataacacggttctcctcggcattttgattaaatgctgttggttattaaatactctccttctcagagctcatctccaaaagccaatgttgcttttcattttgaactctgatgaactgtctcaattccgatcacacacctcggctgaactgcggttgactgcaggctgccgtttgaggaggatggagaaaatcaatatgaaatgtcaggcgaggggtcagattgaacttgttttcccagctggcaggagctggggctcgtagccgcagcagctgaacaaagggagatgtgcactgaagaaggttggttctttgaaggagtcaggaaaatgaatttcatttgcttcttaattagattagcaggctggcagcttgcaattcagaactctgttggtgttggaatagggagtgggaggacagggctgggcagaggcctgaaggccagtagctggctcctccgcctccttcaggacagtcaccagggctttgcttctctggggctgtgtggggctgaggctggagggagaagcagcttctggggctccctgggtgtgtggcttgaccggcttcctgcttctgtatgactgcatgattcttccctgggctctccccgtctgcttctccatccttaggtctcagctcagcagtcactgtcttgtagagtcctcaacacctctacttgtaccagcacatgcctctcttttatacatgtattgcagttgcgatgctatatttgtttctgttctctaactaatgcatcttctctccttagacagtgtggttaatgttatgtattagcttgactgagccatgggctgcccagatatttggctagaaattctgggtgtttctgtaaaggtgtttttggaatagtttaacatttacattaatagactgagtaaaagagattgtactgcctattgtcaatgggcctcatctcatcagttgaaggcctgaagagaataaaaacgctgaccctcctgcaagggaaagagaactcctctgccagactgccttcgagctggaacattgtatttttccccccttgcttctggaattgaatggaaacactggtttttcctgggtcttcagcctgagggttttgtttatttatttttttgagatagagtcttgctctgtcgccaaggctggggtgcagtggggcaatctcagctcactgcaacctctgtatcccaggttcaagcgatgctcctgcctcagcctcctgagtaactgggactacaggtgtgtgtcaccacacctggctaatttttgtatttttagtagagacggggtttcaccatgttgcccaggctgttctcagactcccagccttgggtgatctgcccgcctcagcctcctaaagtgctgggattacctgtgtgagccactgaggccggtctctgatggcttttagattagaacaccaccatcggctctcctgggtcttcagcttgctggctgcagagcttgggacttgtcagccttcataaccatgtgatctcattccttatgataaatctcttaacttacacacacacacacacacaccccctactggttctgtttgtctggagaaccctaatacagagagtaagctctaagagggaggaaaccaggtctgtttttgcttacccttctgtctccagagtctgatacagtacctgacataaagtatgtgattaacaaatattgattaaataaatgaataatgaggcctcctatatctggcaagagggttggggtttcgaacatcttatgtctgcaggcctagaaccggaggaatccagggtgaataattgtgataactgctgccgtcatttattgactcctttgtgcctggcagagggctaggatctcacacacatgaaatttagttcttgtgaacaacctgccctatgatgctgtccttaatatttctactttcaaatgaggaatctggggctcaaaatgattaaataacttgcttgaggtcatgcaggtactgagtatcagagctgagttctgattccaaagcatctgctctaaatcactctagttttttttttttttaacttttaagttcagtggtacatgtgcaggtttattacatagctaaacatgtgtcatgggtttttttttgtgtgtttatttcatcatccaggtattaagcctagtaccaattagttatttaccattctagttttgaaagcttctaaggccttgccctttttctatcttgtgttcagttcatcaagcttcccagtcagttgattccccaatatccagaatgcatgtggatctgtctgactccaaagctgaggctagtgtcagccacactgggctatggggatgccagggcttcccgtgccatccctggcctccaccctgggttggtggcccagaaagcccggttctgccttcactcactagagaggccctgcctccttagacagctcatgtcacctcacccacagcatgtccggtactgagtcccaacccttcactctctgggagagagttagagactttccatccatccccattcccacttgttatttatgtcaacccttaggcacacatttattaaatatttcctgacctctgcttatgtgtcaggggttcatataatgtgaccaagtcagattcagttcttatcctcaaggcatttactatctacaggggaatgacattgaacaattcatatcacgtccatgtatgacgaatgccaacctttaatatcactaatgtcacttataacacccatagttattttaaaagaaaatgttcattttcccccttctctttctttggatttctatagccaccattcttgatctaggttccaaattatccttgcattgagactaaagcaaaaccttctaactttcctacctttattcacatgaccactgtgttaatcttccataaaacacaatttttattaactctgctgtccagcgaaatgctctcaaattacctcccacatactagaaactgtgcttctccaaccggggtacctgtatatatccttgggcgttaggaagaggggaggatatgggggtatactaaaaagtacaggaagccataggataaatgttacatcttttggaaacaccagttttgtttaaaatttgggagtgggggtagaaacataattattaaattaaagtgaaaatagattttatatgggttaaaatgtaaaattcacatgaatttttagaaagaaaaataaggcttcaaagaaaatctgttgtggtcagcacctcccccagggtcgctggtctctgccaggcatgggctgttttgcctttgctggtaggttgggccaacccagagcacatgggaggaactggattcctctctgtgccctccttccatggcagcagggttcatggcttggccccaccagaactgtatttggtggaacagcttaagaaggactggatactatgggaaccagactctgggtataatataagtactcactgaatgcatgaatacatgacagcataaactttggaatctgatcttcaaggatcaacctgatatgaaccatcattgctatttaacctcattaacccaagattcccctttcccccaagcctgacactttttatttaacacccttcaaatgttccattactttagtaacttcagaattttgcccattctgtggttgctgccaacaatactcttctttctgtttcccacctaaccaaatcctacttgtacttcaacactcaactgctcagcctctgccttccctgtgaggtctgtttcaaatgtctcaaccgtctctgaatggcctaacccataattatctccatcattcacttgagtattaaaactaaactgccttatacattgttcctgaaatgcttcctgggtgcatcttgcctcattagccaaattttaaattccttgagtataggagataagtcttacctttccattgtacccctcagagttctttattgtaacaaatacattgtagatacaagaatatcatgcagtatctgtgactgaatgaattgtagtctagatcagtggttctcaactgggagcaatgttttcaccaagagggtatttcacagtgtctggagacatttttggttatacaactgggcttgggttattggcatctagtgggtaaggccacagatgctgctaaacatcctacaatgtataggacagccccttccccgaaacaaaaatctatgtagcgcaagattcaatggtgtactgttaagaaatgcttatctatattatagtggcttcctaacctgtctccttgtttctttgttctctcagccagaatttaacctttatccttctgccttccatctgaacaatttccctaacaactaattctgatcatactactcctctggttacttttgtggctgttcactcactttgatgaaaaaaatttgggttttaaaaatcatggtcattatgacatggctctggcatcctatagtcacaatctctccaagaagccaccagctccttcccccagctgctgttctagatggcttttatgttctcagcctcccatgcagttcagcaagtcctgttaattttattgccaagatctgtgcagtactgtgcaggttacatggattaaaaaaaaagatgtgtccagaacccatctgccctctcaatttccactcacctctttgtccaggccacccttcaacggtctcctaactggtccccctgctattcctcaaagtcattctccccatggcagcaagcatgatttccttaacacataatttggatcacatcacactgttatttaaacccttttctgatgagggtcatgtcttatttattttcatctctggatgttttggaatcgaacacaaatgttcatctttactgaaatataaaatacggagctgactcccacttgtagtttctttactcctagtgtgtctggtgtagaaagggagatcataagcttccaggctctcccccagcacattggggccagtggccatgccccccacctcccttcagttgctactcacatttggtgtgcctgtcacacagggcagatgcccgcatgtcacacagccggattgtccctttgctgctgctgtacacgaaggtgttgcaatgatgggggtggaactcggctgctgtgatcacctccgtgagctcctccatgttggctggcttaatgtccacaatatctggcacagacgagtcaaggaaggaaccaggagaaggaggcaggaacttggggaaggggagaattagcaatggcaccatcttatattagtaaaatatgtcaacatttgctatgcacatggtagatcctcatcataaacttgtcccaggcagatgaggctcaggaactttaagaaaatagcccagggttacccagtagtcagaggcagcattagaactcaggtctcttgactcctcatttgtgttttatcctctataaacatgtaaaagacatccactcatgaccaaagttaactgcttgtgcaatcaggctaaaatgtaccaagttgcaaagattttgcttctcattttataataatgattaaggtactggtcctattataaccaaataattcattttatctgattccttaatggattattgggctgataagtgatatctataataatagagtgcatatcttctttcatgaaatccctaagcccttctttataatatgttgatgataataataatagctgccaccaataatggagcactagctataggccattcactgtacaaagcatatcatgtactttatctcatttaatccttacaagaactctatataattagcgttttccttatcctcattttttcaggggtggaaacggatgctccatgtgcataaagaaacttgcttcaagtcacatggctaagtgacaacactaggatttcatcccaggtgcaaagtctgtgctctttcataattatgcaaaatttctctcatgtatgatatataagacttctagtctctgtaagttgtgatctgcttttcagcttgtgagggagtttttaagtatcagaaacaagccatccagttggaaagttttagggtcccgtggaaaatatccttagttttatcatctgggtttttttttctcagtatttccctttctgatcaagaattatacctctattttttaaagaccatatccttgtatattggaatgaaacatttagtcttttatttatgaaggtgactcaatgaaaataaaccccttcactgggatgtctggcatgagtgaaggagtgggtttgtacagatctcttcacacctccacccagagcttgggggatcaggacacagaggggccgaggtactgtctgaggacccagcaacatcctgcaaagaacaagccttgtgatgtggatgctgttacacagtaaagctgaccaacaggactcccacttttcctagattttcctactcgtgagccacctttgtgatttttgccctatctgtgcatcatcagatagtactttttacttaacatttttctttcagatcaactttaaattgattcacttttttctttacttagctttatctaaacagtaacccaatgttcataaaatcatgggtttaataaggtagctacattttaagtaatatgcataaaaattgacatgtgataactgcaaatgcgtgtgccaggagtttatgcaccacattttggacaacaatgtattgaatcaacaagcaataacttgatataactgccccattagactgagatggatgaaagtcttgtatgcttttcattaagctagtagcatagtcccctccttagagtttagatgcggtacaagcaaatgcactgatatttttagtcccgctagcactaacaaagtaatcatctatgatcaaacatcactatgctcctgctacaacattccaacatgcaatttgttgcaacaatggctttgtatttggttgtgcctctttccccttcattatctcttataaaccctattgggttctttctaaaattggcatgagactgagctaacagtacatgttactacaatttctcctaccaaacccagatgcaaatattacttgggtctccggggcatgtgagtctcctggattcacaaaatactacccttcaactcaacttctgccagagttataaatatgattgcagttagcatcacatgctgtggagcaagagcctgtgcccctcaggaggaggctctaggctgcagctccggtgctctctcagccactgacccatgccctgggctttatggccatgacgtggcgttgggtaaacggaggttagttttcagctgctgttagatttcctcatcctccagagcaagccttgatatcccactgtgcctgtgaacatgtttctcttttctccaaatagggaaagaaaatctggtgtcagctttctcaacctctaccagtatagctctgaaaacaagctgaactggaagggatcttcgctgtgtgggagggggaggtgctacagctacagttattttttcccacctaaaaataaagccccaaagtaagaatgtgcaaaaacaaagtgcctaaacatgtctatgaaaccaggcacatcctccaccatcaaggatgccagtggggctgtgcccacgagatctgcccagagctgccatctctggatctttccttccttcactggaccttccaagcctacccaccacccagccctcatccccaagccattggcttcctatccccagcaggtctcagtcttcctttttgagtagagggcttgtttagtttgactcaaaggggttccagggataaaccatgattatccctctttttaatcactgggatgatgaagttaagaggaagatatggccagttgctaatgctgatcaggggccaggcctgccctgtgctaacactttccatgtgttgtcccccttgcccctcatctcagccttatgagggcaggattattaacaggtccattttacagccgagggaactcagataaattactcaaggttatgtgacacagtgggcagagctgggatttgaacccaagcttgtctgactccagagcccgggttctttctcaccatgccactctgcctcccttgaggaatggcctcacaaagctggccaaaatgtgacaattttggttcctttgaaaagacccccagctaatctgagagggcagccccatctcttctggctttaggcttgtgctctcttaatttacctaccactttggtgactgcattttccagaatcagaatttttatgtgctctaagattttttttttttttttttttttttttgaagcagaatttgggacacaagcctgataagggattatttggatttttacctgctggaggatttggtgagttctagaaacatttgagagaagtctagttgctaaaaattaagtgacttatggggatgatgggagaggatattcaacatctgtatcctctagaaacccaggcattttcccctgcacaactctaaagggcgatccatgttttcagcatatgtaattttgcccttcatgttgggagggaaggagaaagaagatgagcaattcgtggctccacgtataatcttgaaaatggaatgatgcattttgacagtcacttttattttttttaatcctttagagctctctatccaaattatttccctgttgtcccaaataactagatggcaaaagcaaaacagagcattgaattcatggctaatatacaaccccgacagccaacagattgccattaaattaaccctggggcttgacagatctgttcttcttgacctgactgcttacggcatttcttattaatgctgagcccaggcaaattacatctgctaacaaaaggggttaatctggctctctgctgggactctggaggcagctctgaggacaggagggggcatagccagcttggcagctgagctccatgcttggaaggcagaagaggggaaggtgagggcaccgctgtgccaggcagtggcctaaggcatcatttaaaataataattgaagacaccaggaggtcactccttaagggatccacttcaaacaaatgggaagccagagccacaaatggttcatcagtgtgggatgagggaatggagagggtcatggcaggatggtaagaggtagcatgggggccattcaaacatcatttcctaatcccaagtttagaaaaagctttttatgaaaacaaaagtccagcatgatattagaaaaagattgacaacttaaataaatatacagaacaaggaagtgattagatgaatttttatatatctcattaaattgtttttgcagtgaaatttccaagtctgtaaaaaccatagtgcacaaaattctaacaacagtttgatgatgtcatttaaaacttatactctgaaaatgatgagctaaatgggaagacactaaaacattagtgatagttctatcagggtgggtttacgaatggtttttcttttgatttcaatgatcagcacaatttccacattttcttttaataaagttgtatttcaggctggaaaaaatcttagggccacgcatggtggctcgcacctgcaatcccaacaagttgggagtccaagatgcgtggatcatttgagcctgggaatttgagaccagcctgggcaacgtggtgaaaccctatctctaccaaacatacaaaaattagccaggtgtggtggcatgcacctgtagttccagctactggggaggctgaggcaggaggattgattgagcctgggaggttgaggctgcagtgagtggtaattgtgccactgcactccagcctgggtaacacagccagaccctgtattgaaaaacaaaacaaaaacttaggatactttccatacttatgatgtgtactattttgggtaaggaaagttaggtacaaagtatatacagtctgaccaagaccacgtaaaagatattacacacacacacgagagagagagagagagagagagggagacagacaagggcccattcactcatttctttctttgtgtattctataagtgtttccaaagaatctataccctgccagtactcttctgggtgcaggagatacagtagtgaccaaagcaggccccaagcccccctgatccatggagcctatattctagtagggaacagtcaataaacaaggtaaatgagtattatacacagtatattaggcagtgataactactaagcagtaaaagcaggaaagggagagagaaattatgtctctatatgtcctagattgaatagaaggaaggttcttggcattgtatgttcccactcataagtggaagctaagaggatgcaaaggcataagaatgacacaatggactttggggactcagggggaaagggtgggaaggaggtgagggataaaagactacaaattgggttcagtgtatactgcttaggagatgggtgcaccaaattctcacaaatcaccactaaagaacttactcatgtaaccaaataccacctgttccttaaaacctgtggaaataaaaaattgttttaaaaagaaaaaggcatatggtataatcccaactatatacaaaataaaatagtctgtgaatatgcctgatatataaatggatagaaaaaagtgtgagtccatatcctaaactaggcgagcttccataaggaccatgcagcaagtattttcagccttttgggcctttgccaccgctattcaactttgcagttgcagcaggaaagcagccatagataatatgtaactgaaagggtgtggctgtgttccaacaaaactttacttacaaaaacactttgggatagatctggtctgtgggcagtttgccaacctgttctaaccttttagcagagtaagaggtgaattgtttattgctaaagtaatttaccaaaaaataacttgtattcatgtattatttgtattaaaaataatatcaataaaagaatatcgtaatgcaaaaaaaagtggattaggaacctgaacttcttcccttaggaaagtttcaaaaaaaaaaaaaaaaaaaaaaaaaaaaagaagaagaaagattcttgggtaaatcaggagttttaaattgtttttggctttggcttttaaaatttcttttatttccccctgaacccacattgttgaattagctagcattaagttaaaactgtgatgcgaatccaatgtatagacagcaaaattggtagtaagatttttggtcattttattttccccaaatctctacaatgaatacatattaaacaaagaaaacaataagcattaaaaaatagcagtttccctggcttaaaatcatctgtgagagagctgcgagaccaggaacctcatctcgatgggtaaagtttgagataatattgtgaaaaatacagtgattgtaacaaaatggggaccagagattgggattcagttttgattctatctccattttgctaagagaatttgggaaagtcattttatctctctgggtttccatttctttgcctataaatgggtgtaaccctatcagcctctaagaattttgattattaaacaagataatggaaaagataatttaagtggttttacactggagtgaatattccttcttctgaaggaagcacatatttctccaaggatagggtttatatgcattgcctttgtgaggtgactttcatatgcctctgtccctttgctgctgattttgctaatactgacatgcgtatttccccaattcctgtctaagccaatggaggataagagagccaagtaggacgcttttctgcagggctgagtattataaacattggccaagctgaagagtggaatctatgtttaccagggtaaagtacccacattcaaaagcagctgaggcttttcatatcccacttaaagtctgccagtactgaaggtagaaaatagtaatatctttgtgtgaacacagcgtatttgtttgatgagtgtgatttccttttagggacatgagttgctttgagatctttttccctttccatggtctaaatttaatctttggatattaagcaatgattatgaaacataaagatcttattagctgaaaggacatgttgcttgatgatgagacactggaaatctccaaagaggactccaagggatattcctctcttaagagcttaaaaaaaagtcaatgtgtaaatattcatggagtgtttgccaattcctaggctcaatatgaggagactgacaaagagacacatggtgtcatattaaatatgtattgggcagggtgaaagccactgaagcagcaacaggggagaaacttgtactagaccccacagttcccctggaagcctgcctggcagaatcccactgaattaaaaggaagctgctgtccatggtagtaatgagtgctagaacctggaagccaagagttgaggctacctggtcccttaattagggaatcgactctaacagggcttcagcttggttgacaaataaaatgaagccactgtacagggttgttaggaccaaggtcaaagttgaagtatccctagagtccagctggcttctcccagataagtcctctatctcatattcagagactggacttctgaaaggtgaggcttctgctacccttcccagccttgcttactccatgctccacttcactctctgggcttcaaaaatagtggccttcttagaattcctccaacatgtcatactctctcctgccacaggacctctgtacacactgaacacatgtctccacacctctttgccaagttagttcatagtcttcctctttcagatcttaactaattcttcagcaaagccttccctggtctatagcaggatttttaaaaatgcattcatagaaccatattccctgtcttcacagaaattatctcagtttgtaattatatactcagtgtatttgatgaacattactctgaaagcggcaaatttgttttttcccattttcatgcctggcacaaactaggtgctcaatttatcatcgttgagggctagtctttatttttactcgatatgggcctatttaatagatcccatgttggacaaggtaagaactcaggtcagttcattcttagtcctgcaaaaagagttcaaaggattctaggtataccatagttttcataaagaagcaacatcttttaatataaattttcatttattgctattgtctcttgccctagaaaactactaatctattaatgagttgttatagtcctgatgtagttagcctattaagacgaaagtttgactgcttatgtgggaaactgttacacaagacaaggacagactggctatggatggaagggagagaattcatgaccagttatcatgaggtttagaaatgccttgctctgatctggtgctaaacacaaggccctagacctcagagttcctgaaaacatttagtaactagggggcagcatcttgcaaaggacacccaactgcagaaccaaaggaagagtctagaattgaaaagacaatccagataataaaattagcagaataaaagctaccattctaatgttcaacttttctagtttccttgttctctcaataattatcatgattgtgctagtcctgtttactgagcatttgcttagcaaggcactaccctaaatgtgtgcgtgcgtatgtgtgtgtgtgtgtgtttaattttcataatcctctcgtgatagagctgctttctacagatgaacaaaatgagaaatggaggcttggatagattaagaacatgttaaagcttatacagccagaaaagtggtagggctgggtgagacctctatcacttgttggactctgaagcctgagttctcaaccgtaatgccaaagtcacaccaaatgccagtcacaggaagtcatgactgttttctaaccatatctccagatcccttgtctcactatttacttaatgctttacatacacttactttgtaatctaaatagattttgaatatctatgaaattgtaggatatgatggttatgttttttgacgttcactattgcttagaagcacattgcttaccatccccagtagtagccacactatgctttgggaatcccaaattattctatcctgaaccatgtttcttctgtctcctttgtgaataaggggcattgtggaaatgagacctgcctggtggctggtatttttctgagactgttttgaaagatggccgcttcctaccccagaggtggctatacttcagtgatgagaggctcagtgcttagggcggtctggttgaaaagaactatatagatatcacttatcatcgttctcatgatgacaatgattattttacatatggctgctttaagggtgaatggcacggtctcatttgtatgccagcatctggcagtctgtcacacatctgcagaatataacctaaactgcgctgttaatatttcccctttgcattctccccaaggcatctgtctcccaaaatgcctaaagaaactcccctcccccttgaaggcctagaggcaaaattcagaaaacatgtcacctagactggggaagcagaagctcagagtgacagccagctgagcctgagcagatttctggctcttggaatagatggagagagaaaaagggaaccaccacccacactcattctattagcagctgcactgccaggcaaaatctgtaggcaggcccagacagcatgtggagtctgttccgtgatcaacaaaatatgccaggcatggtcctgatggtcagttctcattgtctccaaatatatctcataattgccactatctgattaaagctgccttccctgaaagcccttggagacggttgagtgctctccatggtggagactagctagctgtgtaccaaaaccgggtctttttatcctgggcacacagccagactacatttcctaggctgccttgcagttaagagttagccatgtggctgaattctagccaatggaatgcatacttttttagggcatggctcagaggaatctcccacttgtgatcttccatgaccttccccttttacagtcctgctataaacatggtaacattggggagctgcaaatgaaagaggcccgagtttctgaattactgattggaggaggctgcctgctgatggggatcatcaatattagacttcatacgaaaataatcttttatttgtttgagccattatggggtctattctataaacgaaccttcagagctttactataactcttaaaattaaatttccaggttagattttatgaactgtctactggatagcgctactttgatgacctactattatttcgaacttgacaggttcaataattttctgtatgtcagagtgttccacgtactggaatacagcaatagttcatacaaggcccttgctcttgtagaatttacatcctaacatgaggaaaccaaaaatacataagtaaaaaaatttcaaatcatggtaagtaccatgacaataacagggatagtgttattggtagctacttaagagttaatgggaaagagtacctctggggcctgaagtgacatgtaactagccatgtgaatgctgtgggcaaaatattctagaaagagggaacagcaaatgcaaagaatggaagaataaggtttacttaggaacagaaaagtgattagttggctgaaatgaagtgaattagggaagcgtgacaagactggataacaaagatggagacaggttccagatcacgcagaatcttataggccaagttaaataacttggattttattctgagtttagtgggaagctactggaatgttttttatcagggaaggaatgatatttgaattacatgttgaagggttcgtactgtataaaagagcaagaatgaatggagaccagatgagattattgcagtcacagtggtgagagacaacagtggcttatgctagtgtaggtaggtagatagggatatatgcgttgatttgacatatattttagaggcagggctcatggatagatggagttagagtaggggaggctggtaagtggaagagaaaactccatattgatacctaggtcaattgttcagttacctgagttgttcagtgccattcctcataaatctcatgccttaggtttgtgagaaatggagcacatgataggtattcaataaatgaccaatttttactatgaaatagagggtcaacatagtgggggtgaaaatactggcccagctattcagcattttttttttttacctttctatatattttttatttttattatttttttgagatggagtctggctctgtcacccagactggagtgcagtggtacgatctcggcttactgcaacctctgcctcctcagttcaagcgattctcctgcctcagcctcccaagtaactgggactacaggcgcccgccaccatgcctggctaatttcttttttgtatttttagtaaagttggggccttgccacgttggctaagctggtcttaaacctctgacctgaagcaatccacctacctaggcctcccaaagtgctgggattataagcataagccactgcggccagccgacttttctatattttaattaaacaggagataatgatacttacattatggggttgttttatcaaatatgtccttgggggtagaaattattaatataaagaggcatgatgggggcttgagaattgttagcaaagttctgtttctggatgtcaatgctggttataggtgagttcaacctctgaaatttcatcaaactgtataattataatatgtatactgtacattttatcaaactgtacaattataatatgtatactatacatttcatcaaactgtacaattataatatgtacttttctatatgcataatatacttcaatgaggtaaaaaatgtaatactataaagttcccattgcaagtgcttggaactcaataaatgtcagtcactattattttcactattatgagacaatggaaaccagtatgtctgtggtccatgctgtccatacagatttatgaatcctttaacagagaaagaacctgaactctagggtcttatcctattgttgataaaatcacctctaattttaattcgtgacatataaatgcctctgtatgaaggaattgattcagagtcccaatccagagctagccctggcctcccacttgtaataacaatatttccctaactttattgttatgattaaagagtctcataggtgccagtgtattttaaaaggggcaagttctccgcaaatgctaggtgttgcatttctattccatattttctcccagcccactcgcacctgaatactcttaattcaggccagttgattcttgatcacaaagaaaggatactaaaactttgattggttatttcaaagttccataggttaatcctcaggtcatcagcggacatgtaggtttcatagtcgctgttgacagatatggagttgatgtgatatgtgtgtgcgttggcaaatactcttcgtggggtggcctccaccatcaggtccatgggtctcaggacaggcacctgggatgcaagagaaacaaatcacttcagaaccaaagatcttccataggaaaagagtgtgcatgctaatatcatttattatcacacacaaaataatagccacattgaagaaactccaagttagagaaagaagaggctaataacgaatcacacactgttcttgttccattctgttcctcctctttcaaaagatatcaccatcacttagccctggtgggaaatttcattctttataaattctaaacatttttctaagcccctccaggtagcctcatctcaggggaacttggcttccattgtggagtcattaccttccagagacattgttctattttttttttaaacatgaaatctatttaaaaaagggagttgtgggaaaattttagaaatgtctagttcaactttaatctaaatttatcttttatgtcttttcatctcatggctttggaagctataccccttcctggctttgtccttaatccttaagggcattttgggaaactttagcatcacccaagactctaatcgtccaaattcagccactaatatatagggaacccaatgacatctgactgagaaaatcttggtttatatttgtcttagagtgcgaaccaggtagtgtccacttttacatgcaaaactgtcccagtttgaacattaatgatatggtcaccttactgatacataaatacttctcagtaagtatttgttgaatgagtaagaatacatgattaaatgatttctttctggtggatcagagaatcggcaactaaatagtttcccacacatgaccgtctttctggcaaatgtgaacaaagacctatcactcttcctcctttgagttctgggtgaactggctacaaagaaagagaataagaacactaatgcctgagagggaacaaactaaaaaaacacccaagacagacaaaaccccacaacacaggtgtggtcacttaatagaaacaagataataaaataaccaaagctattttcttttcaagcaaatcatttcttgcaactgagccccgactgatttgataccaggtggtagattaagacttcaacttctggattggcttcaacccaggtggcgaggagaagaaaaacaaaagttaaattttctgaagtgcagtcacctcaccaacataaccttttagaaaaaagaattctcccagttcagacttgagggactttaactcacctatgcgggagtttttaaatcaaatcaatgattcagaggaaacacagaattctagacagatgtggtacttgataacccagaaaccacaggtgacttgaggtgtggctgtagaagggtcaggggtcctctgaatactaggaaaggaaagggaaggaaagtctttgtggtcccccatcccaattacggataagggcctatagattaagtgtgtgtggcagcgaatgggagaccagggttctgatcagattcaccactaaccaataggctatgaggtctgggcaactaacctgctcctcctaagcttgagctcaattgcactgtctgcaaaacagtgaccatgctccctgtgctctcactatcgcaaagggtggtttggggttttgttgagatgatctgacctccaatgcatcctcctacccactctttcaacaatatttactgagtgccacacaaagtcctggagtgttcaactggtaagcagaaccagacacaggtcctggcatcatatacctgttcttgtcaggggagatagacataattaaaagggctaggtgcgcaaaagagaggatatactgccaagagggatttaacctgctcagggagaactgaagaggcttccctgagaatgtatgtattggaatgtgaaagatgggtagggatttaaccaggccaggaggggagtgaaagggagaatgtgtctgagggatgtgcaaaggtcccgtgatagaggtgaacaaggcaagagtgaaaaactgataggtcactgtagttgagacagaagtagtgaagggagctattgtgggagatgaggtgacaggctaggtaggaggcaacacccccccccaaaaagttttgccattattccaagtgaatagggaaaaaaatgaaaggatttgcaatgattgtgatataatcaaatccaggttttgactagatcagtccagatgtacaatggaaaacaagttagaggaagaatgaggtagaatttttaaagtgaagatcatacacttttggacatcaactaagggcatgcctgagttaaggcattgcgatggataaaaaagtgactttgccctgagaaacactacaccaaaatatttattgggcattttctctgtgtcaagtattcttcatacataatctcaggtaattctttcaaaagctctgtgaaataggtactcatacaaacagaaaactcaggcagagagaggctaagtcactggcccagggttgcccagctacaggaagcatagctaggtttaattcggggactggaaagtgaatgttctttccactgtaccacatcacattgaaatatcacacagggtaggtatgataaatgctctgaaagtgacataaattgccaggagaatttatggaataactagtgttactggtagttataatggtagtggtattcatagtagtgtggtagttaagaaacctcaattaggtgttgtaggtgttcatggtatttgaacagggcatctattttttcagaaatgtgtgccatgcttttatagtttgtcacaaaggagctccccacctgaagcttgtggttgctacctggttcctctgccgtcaagaggtaccagagctcaaagcaggaccccaagggtcacaaaagaaatggaatctgcaggacttcctgtggctcctcctaaactcttccccgggcctcctcagttaccgtgcattgtctgcagagatttcttgtggctgtggcgacatgggagggagcatgcagccaggaacaagaggcattacagagtgggagctgccagcccacagcttcagcttaatgtgatgggcctgcctgctaatttaggctgacatattccatgatgtactacttaatggggaagggctccgtgtaggtatctggggatggagcctctaatgctttgctcagataagacaggggggatggagagctgaatgccgctcgtggtattccaacatcagtcccaggcctacgtcaaggcttgtctgctgcccagtgactcccctcacaaggagaaagagggaagtttggtggttcaagcaggacacgatggaccgattaggaaaccacattgcgactgtgtttttcatctgctctggccacattctccctttaaggccaggcaggaaggagatccggacactattccctgagtcaggtccacagtcaattgttaaggttgtctctggaaacatacacggagagcttcttgtgccagtcactgagtttagaacccctgactccctgccccacccaactccaaggtgttatctcctccagcgccctcagtaaccaaccttccaaggaagattcctctgtttgccccattttacaggggaggtggggggaggtggagtatccagtccaatgtcacacaaagaataagctgggggctaggatctgaagccagttaatttggttcctgaatgagcacacctagccactactgtgaatgaaactattaggttgaaatacaaaactgccatgtttgcaagtcaaaaattgtgaaatatcagcaatctcatgcggtttaacctaacactttggaaaggctctgtggtgtatggatgtgacatcaaatcagggaacattttgccttagagcctcttcctaggacatcatctgtgtgtgtggtgggagtcttacagtgggaggccatagtgtctaggcctctcctccttcattattcttggtattatatgcttgcatcctcaataatatcatgctgaaagaactatttctgtggataagcaaagtatgaaagtgagtagccagggtagttcttgaaatctacagatgaggtcattgaggtctgagaggttaagcaccttgtccatggtcacccttccggggttgcttgcacagcctaggtctctgcttcctgtcccagacttctgctcccacacaccatctgcctgagccatcctccacaggaccagaatgcccttttgccaaatgacaaaagcagagccagacaaaattcagatcaggccaggacgtcttaactcagttcaaaccttgtctgagccatgttggcagagtaattgatggggctaggatcaaggcggagacaagggatgtgctgagtgaacagtggtcagtccttggccctctgagcggtcagtccttggcctgtctgcaggtggttctgtgttgagcagctggaattcagtgatgtcccccgattcaggtgcttcaccctcctctctgaccctggttgagtttcagctcattctcctaggctgctttcaaaggacgcacatcccagcactgtgtcttgcctggacacccagtattatattagaatatcaaccgaataatgtcccaagccccaaaagagcagcctgaatctaatctgcaataaagcttacagagatatatttcagttgtaatattcctgggaagctcttcccccccagagagtggcacggcttccccgctcacttcaatcagtccctgctcaaatgtcaccccctcagggaggccttccgtgaccatcccacctcaaatcgcacagccttcagtctatcctcttccccaactgactgctcagagttttttaaacacttcagcagttcctcagtgaattttcatcgctatcctatgattaacttggtagatgttacaatccctattgcacagatgagaaagctgaggcagaaaggtgaagttgtctgaaggctcacagtgagtctgaggcagggcgagtactcaggcctggcactcctgccactccttgactcaggagtctatacccttagtcgcttaaggcacactcagatgcttgggaggcagacaagtaaatagatctttcagcgagggcgatcacgctgccatggaggtcatcaggcactgcccaggccgtatgaaccaaacgggtcctgcctggggatcccaaggcagacctcagaaaggagaagactaccaagctaggcagggcttgaagggtgggtgggaggtccccaaagagaggtggggggtagggaggggagggaactgggcttcagtcagagggaccagcagtgtgcaaactcagaggagagacagcaaagtatacacataacgatgggtaactgtgcttctggggtgaggtcagtgatttagttattcattcaacaaatacttattaaatccctcctcaatagcagacatattctagggaccggtgccacaacagtgaactctctgtggtacataagttcttgtgtgtatgtgtacatgaggaaaacctgagttgggtaaggggctagcaagcgagaggtatgctctttgaggtggggtggtcatagaaggcctctctgagggagtggggtatgaacagagacctgaatgaagtgagagggggagccatgcagcaatgtggggaggagcattccagccagggggaacaggaaatgcaaaggcactgaggttggagtgtgctcagagtacaggaggaacaatagcaaagagctttttttttttttaagtaagaaatggggtcttgctatgttgcccaggctggagtgcactggtgattcacaggcacgatcccactactgatcaatacgggagttttcacttgttctgtttctgacctgggtaggttaacccctccttaggcagcctggtggtccctcactcccgggaggccaccatattaatgtgaacttagtgtggacatcctaacagcatagggcactacagcccaggactcctaggctccagtgatcttcctgcctcagcctcctgagtagctgactacaggcacgtgccatgtacctgtcagcaaagagcttttatggctggagaggagtgagtaaggaagcatggcagttggagaagatgttggatcagtagtcagggccggatcaccaccttcactgtgcgggtgaggaaagctcagggaggtgtggctacctgtgagtagctgcctgatatgggactctatcctccctcaccattccttctgtctctgctcacccgctttgagtcttcctccctcaggttcttattatctttcccgcctctcctcttgggaaataccagatcatctttaacttcccagaacgcatttactaacaaaatgaatgttgctgtcatttggcttatttggtgaccacaccagcgattcttcacaatcttccatgacacctaagtgggggttggcgggtcacagtgccttgcttcagagacatgcaattaaagcagagtagagccctagaaaacaggaagcccctgaagcctccactttaaaaaacatatgtgaaaaggcacagcaaggggaggccatggggaggactcccctcaatgcgccttcatgagaggagtttttcacagagaaaaaacaacagctgtgtttaccatggcaacctccagtagctcagtaaattgacagattcaaggcaagactcggagaagagagaagagatggccagataggagataaagaacagaaaagatgaagtcatggagaaggaagaaaagagagatgtctgtctgtaggatgtggatggattttagctgtttagtaactctaggtcaaatctcattgaggtgaacagacaaacctttgaataccattgcttgttacgtacaagcataatcaattatgttatggaaggagcatccacattctccttcctaaaatcagatctcaggagtacccacagggtaggttctccttacttttgcaaaagaaagatatagaaaatgtaccttaacttatcctgaatcttactaaggtgtactatgcaattcataaacacttctgagagggacatttgcatgatacttttaatcaaggccccatagacgaccccatccccagctcattatgatacgtacaacataatcaacattatggggtcttttgaaaaaattgctgtcaatttaaatccacacttgctccatatctccttgttagtgttcaacagatgctccccattcccctctccaaataattgagattacatttagactgacagtatatatcaaggtcatggggtttggtgggttctgtatcatcaattaggaagtgcacataggaaggttataaccacacactggccccagataaggccttcaacaaacatttattgagcatctactacatgctgagaagttgccacacagagtatccttgagaagcttagaggaggtaggcaatatgtaaccccctccttcttcttactcaaaccaccccttttgggaaggctgcttgacctagaaaagacaaagatgagagcggaagtcctgggtgtccacctcatcctaggtatacggaaaccctgaccctggtgctctgggaccacaggtttgaggcccagtggagaatctgagggtgaatatgttatcccatcttgaggcactagacggtaaatctctcagaggggcttggaaattccagattccggcctcgcttcaaatttatcaccttgccttttcactgggcttccttcaagaaacagccttcatgactttttagtaacaactgggacccagacttcattttcaaggaagagggagtaagttgtcataaaaatgggagagcattgggtcctcctataaatatcctaattccaaagaatacagctcagtggtacagagcagccgtcttcaatgagaataccattcccctaggaacagcagtggtggatgacttcctaagaactatgtgaaaaagttttaaggaaattcatttcttcgttcctaacttccatgttctccttcctaaaatcagatcttctcaggagtacccacagcctaggttctccttcttcctttttcaaaagaaagatatagaagatgtactttaacttatcctgaatcttaccaaggtgtactatgcaattcataaacattcctgagagggacatttgcatgatacttttaatcaaggccgcatagacgcccccatccccagatcattatgagatgcatttctaataaaatgttactttttatatttattcatcatttgtcagaattatatgtttatgctgttttgatgtattgtgttctattaatagtcaaagcaacaactaaacccagaagataattttaaagtcttacagtcatatattcataaaagaaaaagtctatttacatctatatttgtcatagaaatgatcaaaaaccttttaacatgatttaggggaaatgcaataaaaatagatgtttgaagaagaaaaaataataatatgaagcttttgacttaaaaaaaatttgttcacatattcttttagtgggtattggtgagtatccagtaatgaggtatttaaatcccactggatgcaaccaaaagatgatataaaagctttattttaaactgccaatgtttaaaatactttgaaatcacattttctgcaattatttaacattacaatggaaatgcttagttacctactttaaaaagctcaggaaagtacatagctattcaaaattcttctggaggtacacaagcacacaatttgaatggtataagagggtttttagagttatgtggacttgggcttggatcctggctgtgctaattaccaaccatgtggccttgggtttgctgcttagtctttcttgatatcagtattcccctccttaacgttggggatatgtaacattttcagtagcactgttaggagaacttagcatgacgattgacacataccatctaacgaagaaacatttatggagacatgatttgtgccaggattgtgctaatcatttatgcacatcatgttattgaatcttcacaatggccttatgaagtaggtactaagatcattgtcattttatggatgtaactcctgaagcaacacaggtcatgaagtttgcccaaggtcatattgttgccaaggggtagaattgtccctggatgtcagctgtctggctccagcccctatggtagctattattagcattcttaccattaacttccaattgtagaaaaatggtccattctgaaagattgcttggggaagattttctgacttttctatattgactatgaggttttagcatctcttccatccaccaagggaattcagtcatgattatataatgttaaggttgcttaggaaaagtagccaggggaatgattggtcattggatagagattaactttattgagaatttaaaaagctgaaagctctcctggttaggagttttgcaaatagctccgtcctcattgtcatgaaaatcttgaacaatatggacgctcatccaattatcaaagcaacctggggggcagagtctggcattgtgtgtacccattattgaagggtaattcagtgtaacaaaccaaatagagtatgtacaatgactgtcaaataaaataaaccactaacaaattaaattacttttcattttcagtaggaagaatgccagtcatttttcattttaaaaaatatgcatcttaattccattttttaaaaacgtgaaaagaagcatttaaaggcctcttgtgctatctatactgatgtttattttctatagatatatttctcctggtcctggggcattttccctcaaagaattagtggagcgttaaacctcactttggtcaaaaaacctgtttcttccatggatcaatggtggatggtgttcagaaagcaggagtgataggctggctctggcttacagcgacatatcagagctgttgtttccagaatgaaactgccactcaccagcaccccgccaaaaccccctgggaatcctatccaaataatataattttgagatttccctgctcacacccttcaacagcctcaatatgtccctaatttcttcttttactggctttgtcatacagattgaaataagcctgagaagaaaaacctctttgaaccaagtcaggctttgtgtttcaggtcattaaatatcttagaattatattctttcatttgacaaacatttattaagtgccaatcactgtattaggtagtatgtgtacacagtgaacaaaagagattaaggggtagaatttaaagtctaacagggaagaaagacattaatgtctctaagtaaatacattgttataaactgtcactgatgctacaaagagatgtatattgtttcatgagagaaagaaataggggctctaacttagactgaggaatcagataagttgtttttaaagaaatgacaattcatcccacgaaagcagggccataagcattcaatcctctaaatcagtgtttctcaattaggagcgattttgccactgggcagtgtctggaggtatttttggttgccacaatagaggggatgttactggcatccgtgtgcaggagctagggaggtagctaaactcattttgatgaacaaggtagctcctcctgaaacaaaaaattatctagcttaaaatgtcaacagttccaaggctgaaaaacccaagtcttaaggacactctcctggaacacagtccaaatctagggtgcatagaagaaaccaagtactaacttctacaatagaccagcaataagtttcagttcatgaagacgttttggattaaaaggtacttcatatacaaagatatatacatatatacataaatatataaaatatctatgtttaatatctatatttcaaagacatataaaatatatatttgaaagacttatcccctatggccagctgtaagaataataaatgcataaaagctgcctggggaattaatgtatatattttaaattcagtgcatcaaaaatggtttgcatggcaaaaaatttcatgctctttgtgtcattgacttcttttggcctgactataaaaaggagaggaaagatacctttttctcagaagataaactcgctaattaccaactcatgcagaaacctgtaattctgccagttttatcttattttttccccagacacttactttttatgccaatatcactatttctcaaagtgtgtttccctgttcactgcctttcctgttatttcctttgatgttttacattgtgtaatgccacaagaaaaaaagagacatcttaaaataccccagtagaggaaaatttcaattaacatttatagctggggagagtgggattgggagaggcggtggtttaatttttggttagtttggttaggattaagcacaaaaattgtttttgctgttttttaactgttattgatgaagtattactttttcctactattaggataaatatcactgaatctttgatcaccgaggattgaccaagcctccgaagtatcacactgcattctgtcatttattaccgtggaatatacagaaccaagaagataaatacaaatttgatattaacttcaagaatcttacagctggaagttacctgagaagtcatttacattaaaaaggtctggataaacacaaagatgcatttctaagaatttaaaaaacatggcctttcatagatatccatagaatgtcagttctgcctcccaccaacagatggcagtagtaattactagcaacactttgatttagaaacaaattgacttaagattgacatttcagggttacattgtctgattcccaaccttggctgcacatcagaatcaaataagacctcttgttaaaaactgatgcctgcctccccggggtgctcttttgcccttctgcttctgccatggggtgatgttgcatgaagactctcacaagatgctggcaccttgatattgaactttccagcctctaatactgtgagaaataaatttcttttctttataaattacccagtctgtggtattctattatacaaacacaaaatagactaagactatgggtttaaaatgatttttatagttctatactgattgaaggtttatgttaattttaaaaattctgattatttttataatcataaaaagaaaatcacttatggaagataaaaatgacaggaaaagggttactatttatgatatacaaagagttcatgaaaattagtaaaaagacaaacagctcagtaaaaatatgggcaaaaataggaatgaaaaattcagaaaaagggaaaagaaaatgaccaagacatagatagaaatatgcccaactcattagtaaagagatgtaaattaagatttttaaaatctttaatcttataaaagattaatctgatgaatcttttaatttttaacctttatgcataaagaatttactctatgccagtcactgttataagtcttaaaactattaattcatttacactcataacaattttatgaggtaggtattcatatcatcctctttttacagatcagcatatctgagacacaaagcagtaatgtgtcctagctaaaagtacacaactagtacttgctggagctgagacaggtactcagtatttctagccaagggagtcctaactctaaaccactatactatgctgcctctcagttggaagtataaaaagaaaaatataacattctatcctggagatggaataaacaacaagcatttactcatggaagcataaactacaacaagattttcagaaggtaatctggaagtagctgttaaaataacatatacatcttttaacttagtaaaccttactttaatgaaatccatcctataaaaacatccgtaaataacaatatacaggcatgtcccagagatactgcaagttcagttccagaacaccacaataaagtgaatattgcaataaagttggacaaatttttttggtttcccagtgtatataaagttatgcttatactatactgtagtctattaagtgtacaatagcattatgtttaaaacaacaaggtacatgcctgaagtaaaaaatactttttgctaaataatactaatgatcatctgagccttctgtgaatcataatctttttgcgggtagatggtcttgactcaatgttgatggatgctgattgatcagggtggtagttgctgaaggttgaggtggctgttgcaatttattttattttattatttatttatttattattattttttgagatggaatcttgctctgtcatccaggatggagtatagtggcatgatcttgactcactgcaacctctgcctcccgggtttaagcaattttctgcctcagcctcccgagcagctgggattacaggcacgtgccaccacgcctgggtaatttttgtatttttagtagagatggggtttcaccatcttggccaggctggtcttgaactcctgaacttgtgatccacccaccttggactcccaaagtgctgggattacaggcatgagccaccgcgcctggctggctgttgcaatttttaaaagacaacaatgaagtttgccatatcgatcgactcttcctttcatgaaagatttctctgtagcatattatggtgtttgacagcactttatccacagaacttctttcaaaattagagacaatccgctcaagcactgttgctgctttattaactttattaacacagctttattaatattgacgtgatattctaaatcctttgttgtcatttcaacaagattcacagcatcttcatcagagtagatcccacctcaataaaccactctttgcttatccataagaagcaattcctcatctgttaaaattttaccatgaggctgcagcaattaagacccatcttcaggctccatttttagttctagtttttttttttttctatttccaccacaactgcagtgacttcctccactgaagtcttgagcccctcaaagtcatctacgagagttggaatcaagtgtttccaaactcctattaatgttgatattttgacctccttccttaaatcatgaatgttcttaatggcacctagaatgaatggtgagtgcgtcccagaagatgttcaatttactttgttcagatccatcagaggaactattttttggtagcgatagcctttcaaaacgtatttctcaaataatatttctcaaaaatgactccttaatctgtgggctgcagaatggatgttgttagcaggccggaaaacattaatctccttgtacttctccatcagagctcttgggtgactaggtgcattgtcaatgagcagtaatattttgaaataaatctagttttctaggcagtaggtctcaacagtgggtttaaaatatacagtaaaccatgctgtaaacagatgtgctctattcaggctttgctgttccatttagagcacaggcagaatagatttagtgtaattcttaagggccccaggactttcagaatggtaagtgaacattagcttcaacttaaagtcaccagctgcattagcccctactgaaagggtcagcttatcctttgaagctttgaagatagctattgacttctctccagctatgaaagtcctagattggatcttcttccaacataaggctctcttgtctacactgaagctctgttgtttagtgtagccaccgccacccatgatcttagctagatcttctggatagctttctgcagcttctacatcagcacttgctgcttcatgttgtacttttattttatggagatggcttcttacacctcatgaaccaacctttgctagcttccaaattttttattctgcagcttcctcccctctgtcagccttcatagaacaaaagagagagccttgctctaggttagacttcggcttaaggaaatgttgtggctggtttgatcttctatccataccactcaaaccttctctatgtcagcaagaaggttattttgcattcttatcatttgtgtgctctctgaagtagcatttttaatttcctccaagaacttttcctttgcattcacaacctggctaactctttggcacaagaggcccagtgttgggcctgtgttggctttcgacatgtcttcctcactaagcttaatcatttctagcttttgatttaaaatgagaaacccaaaacaccccataagaattccaacattaacatcagagattaatgatcacagatctctataacaaggataataatgaaaacatttgaaatattacaagaattaccaaaatgtggcacagagacatgaaatgagcacatgctgctcgaaaaatggtgctaatagatttgcttgttgcagtgttgctacaaacctttaacttgtaaaaaacatactatctgtgaagcacaataaagcgaaatgtaataaaacaaggtatggctgtatgtctgagaacacgtattgtagcattgttagttatagcaaaatttagaaacaatgtgaatatctatcaatggagaaatgatttaatgtcatagcttatctatgctttagaatatctgcagctctttcaaggaaggtaaattggcctggagggatgtgtatattactgagtaatatgtctagtgtgatctcagttttgtaaacaaaacaaagtcatatctgttcattcattaatgttaatatatgtattcatagatacagagaaaggtatggaaagacatacaccaaactagcaaccttagttaccctgagatatggaaccgtaaatatagtattatttgactggatgctataaacaagcatttcttttgtaagaaaaggaagggaagacatcatgtttaatgttttgtcagggcaggattcttaagattcttcagtctgcactggactcttcttgggaaaacttaagcatctttaatgagcacaactttctcattcctgtgagcttaatatctgctttactgaactgtccacctgttcccagagtggacagggagtcagcccattccctttctttgcacaacagcacttcagatacttgaggacagctctcaacccatctcctctccactttcatagattataccaagactcagcctccaatcttcacacctcaataatggtgagctcaggccacttggcctccacaaatgctttgcttcactgaacacaatctaccagcacaggcatttattattccaaagaagacatgtgctttctgtttctgtatgttaaaacagacttccctttgtaatcgtccatatcatgtcatcaagtaaaattcccaggtcttttttcaaatgaagtaatataccaagttgaatctattctatactatttgactgttttgaacttgaatgtgatttcctaacctctcctcctagatctgttgctttctcttaaaatgcagaggtaggaaatggtatgtgtgtgaatgtgggagatggtggtaggaatctactgaacagtagattctggataattggatttttctgtctaataaaggctattggtcagaagatgaacaaatgagttagggaggtggagaagacaatggcaatgttctgaattcaggcatgagggtgggagagaccgtaaatcttctcttcctcaatggctgagctgaatttgaatgtagtgattctagaaaataaattgttatatgaagtggatgaagatgaaataactccagagaagaaggtttgctggttccaaggagagacagcaggaataggcgtgcgcgcgcacacacacacacacacacacacacacacacacacacacaaaggagataaaaagtaaacaggatgggatgagcaagagaagagagtatctgagaaaagaagcagaaataagactctatagaataaaaagatgccaagctttcagaaataagaatggagaaaaagaagaaagcagggaggtgaagtaatattctagtctgggctctttagattttaagaacagaaaccttcctaaacttacttaaaaaaaaaacccaaaaggattactgaagtacagaaaaatattacagatcatcgagactgaaatggagcatatgaaatagaacagggacttggcaagctgttaggaacctcgaaaaatgtgctttgtttttctgtttctctctttgtctgtcttgcttaggggccacctggtctcttaaacgccttctctctgcatgtctggccctttctcctctttttaccaatgacttcatctgtttaccagtctgaatatggcctccaatgagtcactccagcccagattttataacactttcagcccaattgctcagtgctatcagaaaggagagaaggaaacaagcaggcagagaaacaaagtgggaagaaggaagcatcagagccctgtaattgggtctcatccttgtcccttggacatcccatattcgtaatcacatccacaccttttcctaggatattcctttgttcacctcacttctatccacccatccatatccctaaatcatcccagaacctgactgctgcagttaacagagctcatctcattcctcctttcttatatgtacccactgtgatgaagaataattggatacatttaagagtcctaaagaaaacgattaattctctagcttccttcttcaacctgtcactattttgacaaccctcctggaatcattttgtaacttgagctcctagtgttttaatctagatttctaacagtgtcttgtataaggagggcaaagcacaagtggtcactattccctagctagaaattttattttgtttggaatgttataattgcctttcaatcttctttaggcaatgaacccatttatgtaattctccctcataatttccccccacttccctgccaatcttagaagtgctatgagcccttttcatggcaatcacattctttttaaaaactagatcctcaaaccatattagagtaagaatttatcctgaactgaagaaaattacgtaattacttcttctggaacaacacactatttggggtgacttatgcctggtctacttttaagtaacactttcatgttattcactaaaaccctgagatcttttttctgcaactttactttggctgtgtttccactttctacacatgaactgttgagttttctccccacatgtcccagcactatgctctgtccttttagaactctgaatcctatctattcccttcaagttttcaaggttgtcatccatttctgtactgctttctgacctctttgcccccaaatgttgtgaactgcattgccatagaatggaaggaagcagggcacgggtggcatggacagaggttattgcctttgaggactgtagactccattaattcattttcttcctgaaggaaggaatataaattattttctccaatagccaaagcagaggacctttttaaaaaaccatcaagctctgaggctaacagaaaggaaaggaaaacctaaaaagaagggaaaactaatcatagagagggaaaagagaacaaatgtgcagttcatttaaaatcactgtagttgaacatcaaattatggtacctgacttccacctattttacattctatttagtatttattttgcctctaatctaggaatacaattatgtactgaattgtatcacatatgcatttaatatgtgaattcaactatatatgcttagaataatatgaaaaaaggaaagaagcaaatttaaataatgggtcagaggtcccagggagtatgagatgggggaggggagttaatctgctctttcttcagaccaatggtctgggtggatctcatctctgagcatcgtgggatgttgaataagttactaaggtttaaggaagtatatttttcacaaatggcccctcatattgtttgcatagtttatattctacattattctttatatcctatatatttatatgtatatattattctatatagagttaataaaaacaaacaaatcttatgggtgatttatgggatttttcaagagtatttttaccaaacctggtgcttgctttatggggcgactttggaacctaacctctgtaaaactgccactttaatgaccctttaaaaagtgcttactgtcccctgtatgctttacatacgttacctcctttaagcttcacaaaaatcctgcatagttgataccatacatattttacagactttaaagagctgaggctcagtgaggttaaatgacataataagtcatgaggtcctcgggatcagcagaactaggattcaaataccatctgaaccttacagagaatggtcaataccatggcatttttttctggtgacgttactatatttccagtataaagaagatttatggattatctagatctttaaacatgaattcctcttgtattagagggaaaataaggctagcttcaggtttctctctgcagtaaactcaatgtcagaatcataaccaaaaaatgttcacaaaattatgacacttttatatctttcaggttgtgattagcataggagtaaagctcataagcaggcaaaaactcagtgaacacagtatctgtattattttccatcatatccttggcatccaggacacaggacattacacagaacaaatattcaacaaatgtttgttgaatgaatttaaaagaatttaaaaacaaaatcagatttttctcattcagagattcctaaactggcttttaaaaaaatcagaatcacctgagagttcttaaagagcaatagaaaatacagacttcgagatgaactcagttggtctgaggtgaggcttaggtatcctgatttttttttaaagctctccaaataattgagggaaaattagaatagtgttttctaaaactcagtccttttagtaccccttcagattttcttatctgttttatgtgtactattatttatttatttatttatttatttatttatttattgagacagaatcttgctctgtgacccaggttgcagtgcagtggcgcaatgtcggctcactgcaacctccgcctcccgagttcaaacaattctcttgttttagccttctgagtagctgggactacatgcatgtgccaccaggcctggctaatttttatatttttagtggagacggggtttcatcatgtcagccaggctggtctcgaactcctgacttcaagcgatccgcatgcctggcctcctaaagtactgggattataggcatgagccactgcacccggcccacttagtattttctttaaactgatttgcttttagttaactaactttattttgatagggaactttacactgtaacacatggaaaaccagttttctatgaattgtcaaaaaagaagaaaattataaaaataaatacaataaaaattgtttttaaattctagccagatagagtcatctgaaaagacagagtgtaaggtcagttctcagtttaaaaaaatcaagatttgtaagtgttatgagagaggttaaaaaatattaacatcaaactgagactttgggcttgatgtcatcagaataatttataaagcaagaaaggagggaataacttcctcaattatgtgattcaatattacttacagttgtgtcttacatcaacagaaacacatatcctagactttgggaaacacaatgatatacaccaaggtagtatgttaggtgattcatgtatgttgattttaagtatttatagaaaatgtactgtgtcaggcaaaatattgggtcttgagaatagaaaaacacgtctctgtccttaggttgtccagtgttatttcacataccttctccccattaagaaccgctaaatggtgggtttgatgagttatttgcataaacaaatagagctgggattcctgtctggacactgaaggcctctgtctctcaaccatatgtaactgcagctttcaaacctggtaaagggtaggattgtcttttacatttgcttcctataatcatgacacagtagtgcctaatacttactgtgggctttctgtgtgccactccatcaaacacattgtgtaatttatcccatctaatcctcacaagtactgcatgaagcagatactataagtgacggctgacttcacttctcagatgagaaaactgaggcacagctgtaaaaggagacattatacatcccagagagcacaaaactacatcctctgttttacctgactggctgaatccctgcctatggcttttcttctattgtattacctgctattgctatttaaatcccatttgcttatcctggtgtgatcagaaaaggagcatgtgactccaagggtggtctcattaacttctggttattaaagaggaaaatgtggaggactcggggacaggtacagatggggatggttggactaagaattaagttaaacgataagcaaaacggagagaataaagggaatatttcactagaggttaagagaaaaataatgagctcttttttaaacacaaaaggagaatataagtggtgaagacggaagccaggctgctggagcttggcagggggtaatttattgatcgacaagtaagaatgtgccaaaaagaaagacatagggaagcaaaattatttgctgctgctttcacaatgggagacatccaaggaggcaagaggagatgtaaatttcccaggggaagaagattatgaagcaacattcttgttttcgagtcctcaaaaggcaaagcattggtttttgatgttgaacaaggatcaaaccacacaattgcccctgggtactgacagacatctgaagctgtttggggtacaggaaacagagactaaatattcctgagtcttgagtagagtcagagaagtcctgaatttgctcagggaaggggctcaaagggtttctgtggattttcctagagaaaggggtagagtctggaattagaggcaaaaaaatagctctcaaggatactgctggagacatgggggtggggggaatgcttgaaagacacataaagggtaagcagactttgttcgcatgtaccagattaaagttacattatctatcccaacacagaaaactgcttgcagaaactgagatggataaagacagctagagaaaatggacaccatagtttggttcagcatgcaaacaaataaagatggcagaccaacctccctccctctataagtagtatatgcagctgttctatttgagtattcatttaacactttcttgttaatttccaagttctataaagactctgactcacaactctctccgacgatttattttttccttcacgagaactctctagtttaaaatgacattctattctagatatatttataggcatgtacatttttttgtcttgaaatatagaaaatgggataaacccagatcctgagatatgacaccaaatatagggaggcatttttattttttaaggttgcagggaagctaagtttacagactgtttggaattttattctctcaacatatatggcacttgcaaatgcttctgttcatacatttttctttctttcctagaagggaccagtgccaataaagctcatctgtctgagttatggttttttccttctgataatcagcaagaattatgcaaaggcacagtgttgttatcaaacagaaatatagagcaatctaattctacctgataatttggcatggcacattgtttttccagaatctatcttaccacagatgctggcgggatgatttttataggaaagcagtccaattaagaggaaaatttctgtaaagtaagtacaaatgtctaatgttgtatcttaatttgcaaacgttaactgggttaataatgaacttgtgctggaagaaaagattatttttttcccttagtggtcaagacaaaggagaaaatatcaacagaactttttttgggtttgtttttatctaaggaaaagtaacctatttagaagattttttttttattgctactagaaaatagacataaagtctaatattcgatagtggatcctttaacctgaggggaaatgcatggcccaggctgagaattctgcatttttggtgactaatgattgaagcagagaatctaaaggaagattcaaaactaagacccttgactttaacagctttccagacaactgtacctgccatcagcccagaggcccctcacatgagacttaactgcagcttcttccctagaaaggagtgactcctgagcatgtaacctttcttagctcagtgagaacttgaaagtttactgagctttcaaaaacaggcattagaggttgaactcacttacctccctttatccacagaatctcaaactgaggatttttttcatcatcatcttatctgcacttgcagtttcccattctcaggggaattttcttccagcaagggatagaaatattcactaagaagtcttacatgttgaggtcagtatgtcttaggcaaataaactctgaccatacgaccaagttagaagtctcttccctcttatctgtccttttataaatgtattcttccatccaaaagtagcaactggagtctcccagttatctctctgttctgagcattcctgatttccatcttggagctagctacatattattgaatggttagtactaaaagccagatactgtgctaatatttttttctgataacaagtcctatgagatactttaaataatattatccctactttgttgatgataaaactgatatggtgagagcttaagtaaaaggctcagagtcatacaaagacagagctaggatatgaacctggagttgtcactctaaagccctagactctctcccatgacgatttcaactatgggatttctgcccctattacacaataagtagaaataagtctgcccaacacttctcctggcagtaagaacattttgctcacaattttgaacaaacaattattctgttttaaagtatccatgtgactcattccctcagctcctacatccctttgtgtactgtcttgatgcactttttgggtctgttcatatatttcccttctggtcctaaggaatgtaattgacagctcatacatcttgggttgtgttgtaattttgagaatatgcttccctttaaaatacaccaaggtggaataaaatgtctcctccatcattggcagcaggaatatctgggctggacaaacatgtggctccctttcaatgtaggtgccaaactccctctcaaaagttctgggaacttagtttacatctattctgaagaatgaaccagtctcccccaaagtgttatccactctgtttagagtagcccagaagaagcacaagacttagtatttcttgagctttgctgtacaagttagtagttactcagtgttggcgcttctccaactaggatctttcaggctttcacattcagctagatacttggtggtattatattattattattgttattattattagagatggagtctcgctctgttgccaggctggagttcagtggcacgatctcagctcactgcaacctccacctcctgggttcaagtgattctcgcacctcagcctccaagtagctgggattacaggcatgcgccaccacacccagctaatttttgtatttttagtagagacgggatttcaccatgttggccaggatggtttcaatctcctgacctcgtgatccacccgcctcagcctcctaaagtgctgtgattacaggtgtgagccactgcaccccgccgatacttggtattttatacaacataaattgtgatgaaaatctgagtattgcccaaacaacttaagcttttgaatctttattgagcatcttctgacttgctatctttcattcaatctttgtttttatgttccccctcaccccgctataaataccctggtatcctggactgtgggatagcaggttagttgcaattggtctgtctcagagatttttgcccagtgaatgaaaggaaaatggcaacaataacaaccatgattgttatggcaattacaaggtagagaaatctaggatgaaacatatagcaagtgcaatattaagcatgctccctgttaaagtctgggaaagccttggtggctgctattgttagattagcagtaaatgctgttagcaaatgccatagaaacaaattgcccctttctggagccagtgggcatttgtctttgtcgttcctctgggcatggggctcagttttctttgcatggacagcagaggaaatcctgctttggaggaaagcagcagctcttttttatggttctgcactgttaaccaacctcagtcacttctctctctctctctctggcccactgcttgcacagaaaattgaggtaatgatttatatgtcgtaagcagttctgacaggtgcactctatcttggcttcctcctgccccaggactaatcggaagcttatcttttcctttgtgtaatagggagctgtcaggttctatgaccctccaaacaattcaatcactcatgggcggattcaccttggagggaggacgccttgatattggagaaacccggtggaggccatgccctgacatgtattgaaacaatggcagctgggggctagagggcaacatggccaaactgacaaaatgtcatttacttcctaaatttaaactcttctgccaggaactatctaggcggcttttccatgttggtgaacatcctgtcttcagtgcagaacatttagctatctgggcaaagtagggctgttccaaaaaatgacctgtacagagaagcgagggcttgcattgctcatggggaaaaaagcgagttccttaacaagacctatggtgcccagcatgatctggccataagctgcctcaccacctgcatcttactggtaccacacatcccctgcactcagcttcagccacctgggccctccttccacactgtgtttttctgtgctacctcctacctgatgggctttgtgcatgtcaccgcctctgcctagaacattctttctgctcctcttcttactttcctcctgctgtggtttaaatattaattgctcaggaaattatcctctgctctccctgaaaagatcaaattctccccatcatctgctctcctgtacaccattcacctttcctctagaggccccattacactgtcggctttacattaggagcattttatgcatgctttttccaacccaaagagatggctagctccatgaaggcaggaaccatatctttcatgttcacttctataactccaggactaatcatagtacctggcttacagtagggacttaataagtgcttgtggaattagtttttaaaatgcatagcaagaaaccgaggtggtgcttatgttcttaattggtttgaccgtcaagtagtgcaacggcatatctaattgggactggtgtggcggtcacctctgagtccatctgcgtaaaggattttagtatgggaaggaataatgataaccaagtgtggctttgttttgtcacttctatcttaatctctaaccttataactcctgaactcctatctttgttgtctgctttgtctgctttgacgatcttatgtttccctcataggatgcttttcttagatgctctttgaatttggagagcctatgatttaaaaattcaagctttcagaagtttctaaacatctgtatatttggttttgaactggcaagataattggacagagttttcgctttgtatctggatgttttcgcattaaatagtcagtgtccttatttaattgaatgttgcagaactctcactccctgaaaataatgagaggaagtgagatcacagagtagagaagaaaatgttgagaaagaactcaggcagtttctaaatacacaatgggattgactgtaatgttaggcaggggcaaatgaagtacatgccgtcaccatttttttttgtttgtttgtttgcggttcaggattgctttatttttcacattaatggtatcatgctatgatcttatactttttaaaaaactcatccctccctccctccctccctccctccctccctctgtctgagacagggtctcactctgtcactcaggctggagtgcagtggcctgatctcggctcactgcaccaggctcaagtagttctcccactgtagcctctcaagtagttgggactgcaagtgtgcaccaccatgcctggctaactattgtattttttgtagagctagggtttcaccatgttgcccaggctagtcttgaactcctgagctcaagcgatccacccaccccagcctcccaaagtgctgggattacaggcgtgtaccaccactcctggcccgctgtgactattttcaaaccaaagattcctagtcactggattacaagccccatgagagcagagaccatacatgtccatcatgactatatgtatggaatcctttttaaataagtggcaggtaagattaatgttaggttagacagaaggaaacatttgtgaacagtgatttgttttggattggctaatggttcttttctgcttcaagaagtctctaaagtaggataaagcccccatggctcagagggttaaaagccattgctgttgggaggccaggtaacatggtggttaagagaacattgatgcaaaaatcctcaataaaatactggcaaaacgaatccagcagcacctcaaaaagcttatccaccatgatcaagtgggcttcatccctgggatgcaaggctggctcaatatacgcaaatcaataaatgtaatccagcatataaacagagccaaagacaaaaaccacatgcttatctcaatagatgcagaaaaagcctttgacaaaattcaacaacacttcatgctaaaaactctcaataaattaggtattgatgggacgtatttcaaaataataagagctatctatgacaaacccacagccaatatcatactgaatgggcaaaaactggaagcattccctttggaaactggcacaagacagggatgccctctctcaccactcctattcaacatagtgttggaagttctggccagggcaattaggcaggagaaggaaataaagggtattcaattaggaaaagaggaagtcaaattgtccctgtttgcagatgacatgattgtatatctagaaaaccccattgtctcagcccaaaatctccttaagctgataagcaacttcagcaaagtttcaggacacaaaatcaatgtacaaaaatcacaagcattcttatacaccaacaacagacaaacagagagccaaatcatgagtgaactcccattcacaattgcttcaaagagaataaaatacctaggaatccaacttacaagggatgtgaaggacctcttgaaggagaactacaaaccactgctcaaggaaataaaagaggatacaaacaaatggaagaacattccatgctcatgggtaggaagaatcaatatcgtgaaaatggccatactgcccaaggtaatttacagattcaatgccatccccatcaagctaccaatgcctttcttcacagaattggaaaaaactactttaaagttcatatggaaccaaaaaagagcccgcatcgccaagtcaatcctaagccaaaagaacaaagctggaggcatcatgctacctgacttcaaactatactacaaggctacagtaaccaaaacagcatggtactggtaccaaaacagagatatagatcaatggaacagaacagagccctcagaaataacgctgcatatctacaactatctgatctttgacaaacctgagaaaaacaagcaatggggaaaggattccctatttaataaatggtgctgggaaaactggctagccatatgcagaaagctgaaactggatcccttccttacaccttatacaaaaatcaattcaagatggattaaagacttaaacgttagacctaaaaccataaaaaccctagaagaaaacctaggcattaccattcaggacataggcatgggcaaggacttcatgtctaaaacaccaaaagcaatggcaacaaaagccaaaattgacaaatgggatctaattaaactaaagagcttctgcacagcaaaagaaactaccatcagagtgaacaggcaacctacaaaatgggagaaaattttcgcaacctactcatctgacaaagggctaatatccagaatctacaatgaactcaaacaaatttacaagaaaaaaacaaacaaccccatcaaaaagtgggcgaaggacatgaacagacacttctcaaaagaagacatttatgcagccaaaaaacacatgaaaaaatgctcatcatcactggccatcagagaaatgcaaatcaaaaccacaatgagataccatctcacaccagttagaatggcaatcattaaaaagtcaggaaacaacaggtgctggagaggatgtggagaaataggaacacttttacactgttggtgggactgtaaactagttcaaccattgtggaagtcagtgtggcgattcctcagggatctagaactagaaatcccatttgacccagccatcccattactgggtatatacccaaaggactataaatcatgctgctataaagacacatgcacacttatgtttattgtggcattattcacgatagcaaagacttggaaccaacccaaatgtccaacaatgatagactggattaagaaaatgtggcacatatacaccatggaatactatgcagccataaaaaatgatgagttcatgtcctttgtagggacatggatgaaattggaaatcatcattctcagtaaactatcgcaagaacaaaaaaccaaacaccgcatattctcactcataggtgggaattggacaatgagatcacgtggacacaggaaggggaatatcacactctggggactgttgtggggtggggtggggagggagggatagcattgggagatatacctaatgctagatgacgagttagtgggtgcagcgcaccagcatggcacatgtatacatatgtgactaacctgcacaatgtgcacatgtaccctaaaacttaaagtataataataataataaaaaaaaccacagcgttgcacacacttaaaaaaaaaaagttcccagaaatcctgaagtaaataaatttgcttaactgtgtttaagctagggtttcctatattacttgagccagagacatttgtgtgagacagtgtgtgtatgcatgtgtgtaccactgcttttaacagttttctggtaaaaagaaaataaactcatctgatcacaacaacaaattacaagagcatgacccaccttcttccacccaaacaaacacaaacctaacacctttcaggtagaaaattcctttccttgttgctaaaccattctaaggaaaccagagaataaaatatatttttctgttgaaaacagtctcctttaacatgaaaccacccttgtaagtagttttctccaaccaagatcttgtttttatgcgtcaaagacaagatagtatcttgctatgcacactacccctagggaaatatttaaaatatttttctctggtaaggactggtatttaaaatgcttacatcaatgcatcagtcgaagcccggcttgcaacgtactaggatcaaagtgatcatgtcctctattgagttggattccaaatccatttgcactaattattttctacaaaaatcctaatgcataatgagcagaggccctagaagtcctctactgatttcaaattagttctttgcataacctagtagcaaaaagggatctaggcatgtatttttgatcttctattagtaaagtctagttgaaaaataaataaaagtcagctctttactttgttaacatttttaggattcttgagcaatgccctgcttgggtgttgtatgccatgtacatgcctgcacgcacccacacatgcacgtgtagtttcggggaccggagacacacccattgctctagcaacagtgagctcacacttcagaaatgggacctggtgtgggctgaatgtctttcccattacgcttataattcagataatttcatctgaaaaattcagaaaataaaagtattctctccttcaatcatccaattatccttgatttttcacttcctttgaaaagtatacagagagccctttaaatgaaaagatgggagaatcactctaataacttctcatttgagaaaatcctatctgggtcagtgtgaatcaggtttggaatggtgacaagatccttacttgcaaagccctaaaaaggccagaactctgccctgtcaaccttcccacatctctgaaattcagaccatttaacaaccaaggttagggaaagacaatgtgtcagagcctgtaacactatcaggctttatggccagggaatctcaagataaatggcaccagaggccatggaaacatccagattttcttctgtaatgtgattcttttctttttctgacactagtggacgtctcagcttgccactgccattgagtgtacatatgggaggtgtcctttattagttcctatcacattcaagaagccatggacaccttccaaagggtttgggagcaaaagacaaagagaactcgatcctaaaccaggtatagggttctgcttatatttacgtctatgttggatctaattactacatggtaagtgcagcataacaaaggtacctttgggatgaaagaaaatattttattgtcagtgaatacactctgaatgcaaggcagcgtaggagagtcagtacaaaggcagattcaaagcataatgaattgctagtctctagatgtaatactacttcgaacttttcaatatattcatcatgctttcctgaaactcctagtctctaggtaaaagacaagatgggaaaaaagaggagaaagggattaacataaactaagcgtctattgatggcaagatattatgctaaacacttcaacaagtgactttatcagcccaacctctgtaagaaagtatagttattattctggagtcagcttgaacctggtttaaaaatatggctgtgccacttagtagctatagacatgagcatgtcactatagctctctagatcaaatgtcctcatctgcaaaatgggaataacagtagtacccactccacaggctgccgtctgggcatagtgagatggtacctgcctagcagaaggcctggcacataatacatacttaataaatgtctgcaatagtgttactattatagcacactggcaactaagtaggctgtcccccatgacttgaccaggagtaagaaggggaaagaagttgagttataaaaggcactaacagctcacaatcacagaatcatcatggatgctcattctaaatcaaatcactctcttagtgtaaaggcaaccacattttgataataatgttgtcctcagactgatctatacagaaccttgaggcaggaggagacaagaggaaaaaggaagggattttaaaaatcaaatctgagaatctctacttttgagtagagagatcattatgccaaagggtctcaaacccatctgatcttcaggatggccaagaatatggccgagaaatacgggtgggtgtcttggccacactcctggagattctgagtcacttggttggagatgacttagatgttcccagagtctgatgatcatccagctttggtaagccatgacctagtttcatgtacccttcctaccccgccttttcccaaaattaaacagaaagcccacctgtgcccaaggcaccagtaacttttacaatctccttgaaaagttgttttccagcccctgcttactcatatgtgttttggcttacactgaatattcagatgcatatattaggcattctattttagtacaagaggcaggacagcagcttgggttttagagtcataaagacgtgcactcaagtccaagcattaccacttactagccgtctaacctaaggcaagttccttaacttccctggcttcagctatcacatctctacaataaggataatatcagtgcctatgttataggtttatcttgaagattaaattagccaatgcatgcaaaatgttcttggaacattagcataaatgttagcttctcttttaattccaactgaagtagttcctttggctgacatggaactcaattatcatcatgtctctgaacattagccaaaaatattagccaatgagcagaacagaaacatcccaaactctcatcccccaaaggcgaaacatgtcaaaacacaaaggcttgtcagtgagggtagtggttaaattctcgtggagggctttctgatcccataactgaaaccccatgacactgacagatacaatcagataatgatggcaatcaataatgataacagaaattattatttattttcataaacacagagtatgtgcatcccactgagttacacacatcacatgccagcattcactttcagggcagtcaatcaatgagagatctcaatatccacccgccgaggcaggatggggaggatagagcgaaggttgagaaattacccatactagaatgacacattcacaaagttaatctaatccaggagccgttggtgccattgcaagcctgtgaatatggaataggcttgattgatttttcactgcagtagctaaacacgccattgttatatgcaacaaatgtaaggaaaggaaagatgaaaccataaaaggattggatgtgaagcccccagagcagcaataaatcacaaaatgaagtctaaaaaaattaaaaatggtagaggaaggctgtatctatgtcctaagaggcctcagttatcaaagcatataccgaaaattaaaacctggggcagtaaaggctgatcctgactcaaccaataatttgcactaaatctggcctggggttccccctcctcccagaatgagtattacgacataggtacctcagagggagcaagaaagcctaaaggctatagacagacagaacgtgcttcattcccagttctgcctctttctagctgtgtgatcctgattagatacctggcccctcagagccagttaccctcttttataaatgggataatcacatccacaccactagaaagaaagaaatggcaatgcacatcctgtatgcctcaaaggatccttgggagcatcaaatgagatgcccaacatgaaagcccatctaccctccagatgcatcgtggaaactccttcctaatcccgtctcctccctttgtgcttcttctgaactgccatggttatcttctgtgcttttctcaggacagttatccttctccatgatttctcaaagtgtggtccagggaccacctgcaccagaatcacctgggcattttctgggaggggccttgtcaaagatgtcatttcttagagtccaactcaaaccttctaaaccagcatccctagtgacgaggccagaaattatgttctaggcagagtccccggtgaccatgaggcacacagtcatttaagaaccaatgattgaattcattttatgtttcagccacttgtaacttgtctcctccatgccccctaaggacagagagtgtgtttcattcatctttgtaagagccacactttgtagtgcatgcttagtacagtgtgtagcatagtagacactgagatacaaaatacatggaaaagtcctgtacatcagatgttgtcatcctcactgttgtttaaatcaagtgccatgccataaatagtcctaataatagtgaggaacaggagctctggagtcagacagactctggagctctggactccattcttggctttgctgtttactatttgcaaggccttaagccagtacttacctttctgagcctctgtttatacatctctaaaatgggcaggatgcctaagtcacagaatgatgataaagaaaggacatcaaacaactgcgccccaagcctgtcactaagaaaggctgaatatgcacagttgctactattagtaagcctaaaccaatagtctgtttaatcagttctctaggagacaaatcaagtaaactgtttcactcagaggatctctcttttgggaaaactagctagtcttttcagtcaacttgcctaatctcatgaccttttagcaatggtcctcaggaagtcctcattcaggagtcagagctggtaaaactgaatgccagttggccagtgtcttagacggtacctatggttgtgtccaaattgccaccaatgggatttgctaacatcagggtcattttaagtggaaaaagtttagttctggagattcatgagactgtgagtgtcctgtgctgacaggaggacagaaacagccattgtgtaaaatatgatgtcatttgatctttcctttaaaaatcagtgcatcccttgtgtacccaccctgtggcagaaaaggctctgcagccctcaccccccgccttccaccccaccaaaatctagcttgtatgttaagagagctttgataaaacgttctgagagacatcaatcaataataaaacattcctgccccatggtcaggaatattttcttaaaaagcagagctgtagagaataagatgaaaaacatcagatttggagtcatgcggactaggtttgaattccagctcttccgttttctagccatgagattttgggcaaacttcttggctactctaaaacacggtttccatttctgtgtaatctgttcacttgacagatatttactgaaagtctaccatgtgccatggattgttccaggtgccggagttgcaggagagaacaaaacagagtccctgctttcatggagcttacagtttactgggggtgaagaggaggcagacagcgaagaaaatgctagacagtgacaagagctaagcaaaaaagggcagagagaatgaatgggaaatgtgggtgtgctcttttccataggataccctaggagggcctgataggtagcacttgagcagagactgaaatgaagaggaggctatggcttcagatgatctggagagaaaaatagaacctaaccgagagagatattatgaggactatgtgatattaaggatataaaatctagtacctggcacatagtaagcactcaatagatggttgctataattatttttatttgttgtaaggcatgtttgaataaaatccattcgaaaaattgtattcatcacatcaccttcattttgggaaggttatgaccagtcacagcttgggagctcatatttgtaacaggtaaaaatgccgatttcaacctggcctaggttcccagggcactggcagctgataataatgagaaaaagaatacctccaggcttaccctgcagggagaagtatgctaagtgtgatttctcaccacccaacttccatttcaggctgattaagtcactttaacgatgagctcccattacctagaaagagctctaagggtctgttactcctgggcagcgggaggttggggaagaagggcatggagggtcttctgaagtaaaactgcatagggacctcaaggcctttgtttctccattgctgaggtcagagatctggaaagtcaatgtgtaagtgtgtgtgtatgtgtgtgtgtgtgtggcagggacagtggtagcggggagtggtggggggagggagagagagggagaggaagagagggagagggagagagagggagcgattgatcgattaatcccctcacctggaataataatggcactaattattaagacaaacatttcaaatgcccagatgtatatgtctaagtttaagagcctaactcttgatttttagtcccagtcctggaataaccagttgagggatactgggtaagtcattttccctctctgaggctgcatcggatcgaagggctcaggtcccagagcaaagtagatcaaagcttggttctcagccctgcatgatcttgggtattctacttaactgcttggagcctcatttgttaaatgggcattttaacaccctttgaggtagctagtgcagatagagagtgcagcgtggtgcatggtatatggcaaatgatcaataagtgctagatacccgcattttcacctgctaaatacctgtcctgccctcctcattggctattctgaagatgaatcaagggactaggtgagaaaacgcttgtaatagaaatggtacaactgtaaggcattattattaaattattaccatgattattgctttatgttaagttatgatattgagcaggggatatagttttcatagacatgcttctcatgggctcttttggtaatgagattgattttgaaaggctatcttctatgaaagatatagtcacattcttgctttgaaaagctgagtctctcagcgctgaaacagaacaggttcattacacagtaaggattaattagctgtcgggtattattaaatgttctcactctcaatacccacatagaactggaaactatgaaagtgagcaagaagtaatcatagtacagggaagggaaaaaaagacacaattgctggcaatgcacatttcaagaggagagcgtgttagtaaattatagtctgattaatatcacgtcagctcattctctgtttggagtcattgttctgaatctagtcttcagggttgcctgctttttttttcttctaccactgggatcaaaaagaaaaggaagctggacttttcagtgtttaaagagtgctgtggtgtggatgtttacactgaaatgcaggatatttgagagcctaggaaaggagaggaggtaaatacagatactggtatttataattatatagcaaatataacatgtccctccaaaatataacagaggttatatagcaaatataacatgtctctccaaaaaataacaggttcataaaaatgatagcttgaaaaaaaaaatgatagctcgaatgggccttagggatgatagagtccagtgaccgcagacccccttgtctcagccaccagggtcaagtgttgaaaatgcagattcctctgggcctcctctctggagtgggtctcaggaatttacatttcccagtcctctgcttggcagcttagaaactaagcttggagggaagaagtataattcatcagttaggttgttaggttacacagctggttagtaagaaagcaagaaccagagttggaattttccaactcccagccacacctcagggcctccttctctgtttcatctgaagtccacttcattggcatcactggcttggcatggggaggatctctgctctcgtggaaactgaatagaccttctttgctctttatcatagggatggaattctcccaggggttaagcacagatatatgaaatcccataggatgccatggacagtaggattccacggtggggtctacagatgtcatctgagaaattccatccacatagcaaacaagggcaaggtaaagtctgggcagaagttcacggtataaactctacgtggcacttaatccagttgttttctccataagattgccatgtctcgaggggcaaaagacagtcttattcccaatatattgccagtacggtgtttgccacttagtaaatctcagtgagtagtttgtagaataaatacaacagtataaaaagtataaaaagaaaaataactgaattgtctcatatatataggcccactatcagtagggggtaataatagccatgatgacgatgatgttattaatactaaaacaacagaagggaactaacatcattgagtgctttttgtgagccagcactacacaggctaagctgtttcttacacaaaataacttattgaatcctcacaacaattccaggaagcagtgactatcatcatccccgttatatagatgagacattggaggcacaaggtattcaaatatagccacatgccacatgatgttttggtcaataacactggttccataagattataatactgtatttgtactgtgtcttttctatgcttagatatgtttatatacacaaataccattgtgttataattgcttactattcaacacaggaacaggcgtacaggtttgtagccgaggaccaacaggcaatgtagtctaggtatatagtaggctataccatctaggtttgcataagtatactctatgatgttttcacaacaatgaagtcacccaatgatgcatttctcagaatatattcccatcattaagtgatatatgactgtcatatgcccaaggtcactagcggaaagtaacggagccagaattctaacccaggctggactgactcaacaataatactcttcactacgctactttccagcctccaaaacccctgcacattcagagcatcaagcctggatttatgccaagtccacccagaatgataaggtggacttacatggaggttctccagagctgaaagcataggctgatcagaggaaacagagtcgccaatgcttgtgagctcagaagcagctcaactgaagaccatgtgcccattaggacagggtaaacacctaatagtctagcatggtggtcagcacagagtctatattcaaaaagtaactgctgaataagcagatgtatcaataaatgaattattaaacaaataaacaagtgagctaattaagcatacaatgaccatcccattttggctttcaaacatagggcaagaacctattttcctcacatctacttcactgtctcccttcttacttttggtctttagcagagctgctggtgtctgaaatcacatattttacacagttttacaaggctgttggggctagggctatcccaacatgtgcctgctttactgctcacattgaacatgttcataactgagctcatcatccagtcctaaaccactttaccttacatctagagacccttcccttaaaagatcgctttgagaaatccgtttttaatgccactttcctatgagaacttttctggtctccaaaaaccacagctaattttttcctccttttatcaaattgcaactctccaacactttctcaatgcatttatcttactatatttagtgccataatcatttgtatattagtcttacaaatcctctttatcaggctatgtatttctgaggaacaggaaggaagccactcagactgagtagagatcatatattgaggaccagccatagaggaagggttttccatccttgcacttcttcctcataagtccacgagcagtacgtactgtgttcactgttttgcagatggagaaattaaaattaacttgcatgttgaaagctcgaaaaggttaaatgactattgggaaatttgggtaagtggcagaatttgaagccaggtctgttagattattaagtttgtgttctgaatcacaagactgcaactcgccatctggattctcatccctgtaccttcagtacagaaggtgctcaagacattttagataacgtgaacaacagaggctaagattatagtaacgtctggcagtggccatgtgggcaagtcttctgggacaaaaggaaaagcatggatttgtagtcattagaaggcttggcacctttcctgcttctccatctgccaccagagagagactggggtaggctgagtctctgcctacgttccctcactggcccattatagttgcaacctacagtaacaaccagcacatggccaaccttaggagacctgcccctgactgtggtggccagggcagctgtttgcactcacccgcagggttgtgatggtggcaggatcccggagccggccctcctcatctttcagattgtagccttctggcctcttatcacgctcgctgactttccacagcttcacagttttatctgtagtgggcaaccagattaagtcagaattatagtgaaaagcaagctcataagggagttttcctgggggcaatggggagaggaagaggtaaggatggatagaattgctacagaagctggctcacataaacgtttggcgtgcataaatcccatgtcatttgaaggcagagctcatatttcaaaacaaaaacatacattatgctgggacaaatggatttccctgataatgggctcttaaatctatagcttataccttaattcagctcattcaataaaagcatttattgagcattgaataataagagtgcaacatacacagagcttacaatgtaactaagaattttacatgaaaaattggtttaacagtcataactctggaagtaggtgctattatctctattttagcatctcacctcactaacacattgtccttaccatgtcctaaaaggcccttcatgacctgccctctccactttctccacctttctgacccccctgtccatcctctccctgctcactcactgtgctccagacacatggcttccctactgctccaggtacacattaagctcactaagcctcggggcctttgcacttgctgtgtcttctgtctggaaagtcctttaccctctttttcgtataatttgctcctttactttcctcttgcgcttgcatcccaaccttagagaagcttatgtaatacctacctaaaaatgctgtcctcagaaccattctctatctcctctctcctgctttatttttcttcatgataccttttactacctgacaattggttgattatttatcaaataactatctgtctctttcactagagtgtaaaattgttgaaggcagggattctatctatcttgtttatcactgtaccaccagcacccagaacagtgcctggcacacaatagctgctcaataaacattagtagggcaaatgaacaaatctcatctacctgcatagtacatatttctagcaatattcagggaaataaaatggtaaggagatacactgaaatgttcctttccttttgctgcctctatggagtctccagctggaaactacctttctcacctttgtactgccccagcactttttacaacttgatgacacctggcattctctatagcattaaaacagagaactcctatccctacagaactcccatgagaactcccatccctacacctgtcatgcaggccaaggaaatgagtaaaaagggctaaaggatctgtggagctggaatggcgtgccctacatgcaggcttttaattcaattttttttttttttttttttttttgagacagagtctcgcattttcacccaggctggagcgcagtggcacaatctcagctcactgcaagctctgcctcctgggttcatgacattctcctacctcagcctcctgagtaggtgggactacaggcacccaccaccacgcccggctaatttttttgtatttctagtagagacggggtttcaccgtgttagccaggatggtctcgatctcctgacctcttgatccgcctgcctcggtctcccaaagtgctgggattacaggcgggagccaccacacccggcctaattcaattatttaaggagacaagatcaggcaaacaaatcatgtctgctggccacatgctttggtgggcttgccttatcagatccagtgtacattttttatacttgttttaacatatctttttgaaggcagaacttggttgccttctttgtatcttcctctgtcttgcacaaggtagggtttggaatcagacaaccttgggcccaatccccactctgacgccagtcacatgtccaaggacggggattcccactcagtaggtacataacccttcctcccttccctctctccttccttccctccctcccttttttccttccttctttctttccttccttcccttcttccttcccttcctctctcctttcttcccttcctctcttcttctttttttaaattgagatagagtctcactctgtcacctaggctggagtgcattggcgagatcatggttcactgcagccttgtcttcctgggctcaggtgattctctcatctcagcctccagagtagctaggaccatagtcacatgccaccacgcccagagaatttttctattttttatagagacatgattttttcatgttgcccaggctgatctcaaactcccaggctcaagcagtctgcccacctttgcctcccaaagtgctgggattacaggcatgagccaccacacccgaccacaactagtatttcttaagcaacaaataggattgccagatttagcaagtaaaaaaatatagaacacccagttaagtttgaatttcagataagcaaaaaataatttagtatgagtatatcccatatagttcaatcttacaaagaaagatggtgcctcagtttctttatttgtaaactggggaaacagtatcttcctcatggggctctgatgaggattaaataagtcacagcatggagaatgtttaacacagtattaggcttctaataatggtccgcaaatgacagcttttattagaattagcaaattgggcaactattctgccataataacatgttgctctgacagctttagcttcaaccctcaatgatgtcagcacatcctatttcttatctgtaacactgtcaggggagaaaagccgtccctctgggaattccttcctcttttgccccttgctccattcctccacttctcctcacctgactttttgccaccacctcccacttctcatgcctttgggcggacagatcttctaagcaggagatgtggatcacagtaccattcgccttgaagctgccagaaacaaatgccttgttcttggaggtcttaatgaaccacattgtgaagtgggctttcagcagcaaataagtgccccattttcttgtatctgggcatcacttgggctgctcgtgtctgacacactggcaaggctgctaagtgtatgatttgtgcgctctgaattgtgccgtcaccctggcttgcgctggagcgaaaggagatcctgctgcataccgaactgctttttagggtgagaaaatgaacatgggccatatttatatagtcacgtgattagctcttgatcagctgtggcttagaacatccccaaaattttaataccaaattttttttgttgcgtggctttggaatgtatcccatcccatttgcaaagttaacatcgtatatttttcttatcatgaatgataaattgctatacagagaaacagagaaatcatgggtataacatgaagaataaaaatcacctacaacctctccagtcaggaacgatcatcgtcaacattttgcataaatccttatagtactttttctatgtactttggggggagaatacaaatctgtaatattgcatatatagattttgtattttctcattttatttccttctttttattatacaagcgatacatggaatgtttattaaaataatcataaaggtaaaaaaactcccttaattccactagatagagatacctattatacaaattttgtgatttcttttatatttatgtatacaattatgtaactgtttttagtaaacataatatggcatacttagtttacagtatgcatttgcctaatcatatttatctataccaacgtctatccctgcaaatatatttatagggatagaatatatttgtatactataacgtattgcatatatgatttataatagtgagaatttgttaacagctaaaggactaatcgtaggaggcttactagtaaactaaagaagaatcatacaaggaaatactatgtggtcattatgatattttagaatatttaacaattgggaagatattcctattattaagtgttatattaataaaaacctagttacaaaagagtttgcagaatatatcatatttccattaagaaacaaacaaatttatttgtatctttttgctttttactttaaaagacttaacagtggttctctctggatgggaacacttttattatttttgtttttctatatttttttttccatgaacatgtactaatttcatagtgagaaaaacaaattcagtataccccacttctcattataggtattgaagtggaagcagaaaatgaggtaaaacaatgtgtttttatgtcataaataatttgagagtctagattcacaattgaatgttggttttattttttattgaaattgtaagtttgaaaatatattctagcagaaagtaaaaattgttcctaactataataagataagcagtatattttcttaaagataattgatagtgaattcaatccaattccccatggttgggttgcctggagtcattcttgactttattatcacactttttttcttgactcagtatcttgaagctttgtgaataaaaaagtctaaggaacatgtggctgttaatgagtaatgactttttctttcttcttgctggttctctgagtagtttatcatcgcttgtggcagcttttaaacacaatcttatcatctatcttcattttctcttttgtacagtaattccaattgtcttccattaacttttgcatgttaacctatttggcctaagggggattctcaacctcaatattagtataaaaaagaaaattacataagaacatgggaatttttcttagaagaatcattttgagatgctgttggcatatgaaacagtatcccaaatgggaagataatatccttgttaatcaaaaaactatttaaaaactcaattaacagaatattatgctatataattaatcttcattgcatttcactgattttttcccatccccccgccaacaaagtagttaataaatccttgagttttttttttttttgagatggagtcttgctctgtcgcccagggtagagtgcggtggagtgatctcggcttactccaagccccgcctcctggattcacgccattatccggcctcagcctcccgagtagccaggactacaggtgccggccaccacacccggctaatttttttgtatttttagtagggacggggtttcaccgtgttagccaggatggtctcgatctcctgacctcatgatctgcccgcctcggcctcccaaagtgctgggattacaggcgtgagccaccgcgcctggccaagtcttcgagttttaaatgcaataatcaataggctaaatttgagaatataaagtgagttagctatagaagacaatcagacatttttcctctgcctaaagtaattaagtcaaaatcatcagaagtctcttttattccaagtagtgttgaatctgcaaagcccgttagtgaaacttaaatagcaaaattaaaaggaaagaaattgaaacaaatttatgtggtttggcttccaagaaatcaggattgcaaaacataaacagaacaataaatatagttatgagaaagaatcaaactacttggagtctggaaaaacagatgagtagagatctggtcatgaggagatgagatatgcttggataatcctaaaccagctgcgtccgaattgtcatttttttagacttctatgctggctttatatttgagagatttggggttcaaatgcattaaataactttccgcttttttccataagattaatatgagactcattgtaaaactttacaaattaaaatgacaaaaggaacaaattgacaagttgcccatactgcacaaaaattaatcatgatgaaccttatgttgtatttccttccagtctttaaaaatattcatgtatgtttgatcacattattgacactgtattttttcacttgaaatatgaacatttccctttctttttaaatcccttgcttcttgcttctcgatttaaattaaaatgtatattcctcatagactcacatatgagataaaatgaatcattctccaactcattttcttgggagagagtgtttaatttttaaatacgaatcctcttaattgttatgctattcaattagcaccctttaacatgtgactttatgccaagttgttttgagcttagatggcttcttttagcaaggatttaagaacctggaggttaggtaattccactgtataaagacttacccagtcattatgtaatttgtctctctattcagtacccaacatcctctctctctgacctatttatgtcaactcctcctcatccaacaaatggtgttaagtatggagggagataggaaaagaaaccctttcttgatcagttttttgataaagtccctatctcttcttgccttgtgctcctatcatagaagttaatttttgtcagagagacacacagccatctgctttacagaccctaaaatatattcagggattaataacttctattcaatatgccaacctcacagagacagcatgttgagtttcctgaaatgtattcccagaataacattcagtgaatcttaagacaggaagtcacattccaaaaacacctgcaaataatctgcaatagttgaaaactgcagataatgggtctcacataattgggtcataaatttaatattttaaaaaacagtagttactatttattgagggccgaatctgtgtgtgccaggcactctgctaagcatcttgcaaatgttatttctaagtttttcaacagcccacacagttcaaaggaaattgaggttaagagagattgaagtatatagtttggccgactgtatctctgaaaataccaaacaggaattccacctaccattagtagacagaagaaagtaagctgcattctgctgggggagccatcttattttattgattttttcttctatttctaaactcttcaggtaatcgaactcgggttcatggctctggaatgtgctgtaaacattgtattcacccctacgatgaacctgatttttactctgtaggaaaggaaaaaaatacacaacagattaaatcacagtagccaactgtaaaactcgccaactcccttttttttccagcagtcattgggggtgggatgagggcagggccatgaggatgagggcagggccatgatagtcactagcacctctgaaaaaaaaaaaaaaaaaaaatatatatatatatatatatatatatatatatatacacacacatataattatacacatgaacttctgtactatcatatagtatacataatacatacatagaaatattaaaatagaacaaaattttaaaatcaatataaatagaagttctaatattttctttttgcatcctaacagatgctgcagtcaccctttggagtgagtcatcccacagtggcattcgtaaatacttacatcgaccccttaaagagagtacaaaattgtagcatctatgactttcattggccttttaagatctcacctgattctcatgaaatctctgaggtagggtggggcaaggaaatggacaaaagaggctcagatattaaatgactttccctaggtctcacagctcataaggagcagatttgggcatcagatatgcccctgctccttttttttttttttctttccaacatgagtgacaaagcagacaggagctcagggatgctacctgcatcattaaggaatgatgagactttacctcttggctttcctctagcgctgattatgcaatgagcaaacagcagggactacatacatgatgagagaattaaacacaagggcaagggtctgcagaaacaggaagaaaaagaagaaaggaagagaggagaaaaaaaacaggatgtgaaagaaagaagaagaagaggaggaaagtggaaagggaagttttatttcagatattttaggtccttattaccaagagcttcaagaagcaggctttgaaaaactcaaaaattcaaatatgagtcttattaaacatttgttataaaagcttgactcttaataaaagggttaatttccaaatgtatatttctaggtggatataaaatatccaaacccaaatctcaacttactgaccagtgagagtgctgaaccctgggtgtgtaatgtatttgtgcagactctctgggtgtgtgcctcctgagaattcactcctggagctcactcactgaagtcaaaagcaggtctgccctagatgatgtcacatgggtttgtttctcggatttagtgctcattttaatcccaagactggccacaaagcttaacgcttaactgcaggttctttatcctcactgacatttattttttattgaacaaaactaccctgctttagaaaatgtgtcccccatcattctacgaatgaatcaggcttcccaaatatttcactaaattaaaataggtgaaacctataaatagctaatggaaaatgtagagcagaatattactggcaacatgctgccttgggtaatttatgctaaatagctcctccggttcctctttatcatcactgcgaacttaattggtttttttttttttttttttttttaagaaaaagctggaaaaggaggtttgaaaatgagtgttcaaaagactttaaatgctgacatacttggtactatcctgctcatttgcagagagagccagtccaccttaacaatacatttataagagtgttgatttgctaccatccaaatcagactgtcaagtgtgtgtagtatgtgccagaccaattagcactaggcagctctggaaaagcaggaaaaattccaggtcatgaagagctattagtttctacttgccaaccacattttcgtgtttccagggccaatggaataggctggatgcctgatttaatgctgaacacttgaatttatatggaaccccgagggattacgatgcccttatagaaattaattgcaaataatgtgcaattactaaatatatcacctctaaatgaggctttccttttttgaggggaggtgtactgcaagtggctttgaggcacaaagcaggctttaaattgctagggaagtctcttgtgaaaccttcctctcacactgggcctctctcatgcttcccgagtgcccggtgaatctcagaggcaggcagtggcagatgggagagctactagaacacagactggcctgctggaagctcgaagaccatgccaggggaggccaaggaaatcaaattgggccataattccattttgacaaacagaagcagacaccaaaaacctcaatttatatgaaaaagagaaacaattcctagtgaaacccatgtctcaggaagaaatgggtttatgagagttactggaagttagaactcctgctcagaaatggtcctatatgtagcactcagctccagggccctctgtgtcacctacagtgatactgtgatgtgtgtcataagctttactcagacgctagtttgtggccttttacccccttaggtgaggtaagctatcattttcttctctgctgtcccaagttgtcctcttcacatctgttggcaaataaactatgtttttttcctcctgcatattctggcacacctgaaatcaagggagactgaatttcaatggctctatgacagatcccattgaaaaaggaggagttacgctcaacaagcacccatggaattttgcaggtcaggcgagaagtgaagttgttttgcaggtgtaacatccaggcgtagaaagataaggccatgcccagaaaaggctctcttttacagggcttttatgagtctgaatgtataacagttgatgttaatgacttttttggcagtttttagttttcgagcaaagcagcaaggttaagggcgacacataaggattaaggaacagtaggaggcctcctttaaaaagtgaagaaaatgggcattttgcattcaccaccacttacctcctgctctcgttgaaatattacaacccgaccccccttgtcccctgtcgctagtaattctcccgtgtggttgaattctaccgtagagataatgtcagctgcaaagaagaagacaaaggcaatttaagtaactgcacacttactttgaaaggatagataatagatatacttttctgtgcatttaagggcttagggctttgtctctgcagtggaatttacaaggatgttatgttctgggttttaaatgccaccagaagtggcacttgggaagtaaatttcctagatgcccacactgcacagtggtctcctggaacatctggagagaataaaagggaaaaacacatttatacccttttaaggaagagaaaattaacttcatgatggctgaaggaaatggctattttctttgatgatttctaccaaccacagacccttcgtgcatccacggcctttacaccaagaatcttccccacacaggcttcagttctggctattcaaatcagggctgggggctgtgatgaagcagggttaggatgcttgaagcttagacatggaaaatggaggaacagagcacaaagaaatcattgggaaaactctgccagtcgataattcaaggaaggaactgacgaatgctccagcttggcccgtgccccttctttttttgtgagcccaacacatccttctggaagagcatgacttatttcaaccccaggagaagggtgctgagaaaacaaggtcataagggcagagaagtgagggcaatttgtactctgtatttctaatcagagaaaatgcacaggcaccaggaactcagatcacagataattgctgaaggaatgccagcctgccaagtctttcttctatgctggttacccctggaggaacatggacaggtaaattacctatgattggatttattagggctatttttagaaaaatgtcagaggttaattcccccacaattattcccctgcagggctccaacaattgctaccaagagtgcaaatgagttaaaaaaaaaaaaaaaaaaagaggcaggggaattatgactatggcctttgacaggaacattctgaagataatgtctaggtaaggaaagcaaaggggaaacagtgaggtggaaaactaaggcaattacccctgagtaattctgatctcaaatcttacttttatatcattatttcaggattttctttgtatgcctgatttattcaggtaagtagtgtaaaattctccacttcacatataactgttcttttccatgtatgaaaaggctccttatggtcattcattgtgcagaagttaacaaaaataaggcataaaccttggtcactttcaagctagacacatttaaaagaacaattcttgatttcttgttttgacttcttagataattgacctcctagatagcaaatacaaaggcctgcagggccacaaagtaacataggtgaactagaaggactatgtatgtctcctttaaaggggcaagaggctattcagcttaagctgattggggccatgattgcctgtattgccatgtattgcctgatgttctcattgtttaaatatatataggaagctggaaatcaggacttttatgcaaaaatctcttaaagtttatacattggcaagtattttttccaatgccatgagaatgaaaaagttaatcatatctgtgggctgaatgtggtttgtgggttatcagtttatgacttctaatgtacagagtcttcatttggaataggctatctcattccaatactgatgctcttaactagaaatctagttcattttctcgagaagactccagtgaatactaccttaaggaaacacaaaataagcaatatggttactaagttccagatgtaagtttagaaggtccatttatgtaaccaatgcccatgaattgagaagaaagtccagccagtgagaaagccagacacctcaagtgagttatttgaccactttcctttgttacagtttgcccatcttagcaaactactcccatgtttagacgagagaaggcatctacttaacatttgcagttgcttcagattgccctgcttgaaagtaccagtgctaagttacacttctaacattaaccactgcttctggcttttcaatgaatggttagcaaagggttattcatggggcttccaaatttgggtacagcctaaagcgggcatgtctattgcttttcactttttgtctttggtcaggtacaaaggctggtccagttcaaggctcttgaactgctcaaatacaaacatttctcagaaagaaagagtagcaggaaataatgagagggtggtgggagccaggcctgaggtttacaatgcctggctcttgtctcagagctacgttctaaagttctgcttacatgcagtctatgccctttcactggacagtgattaatgcagaacactagagttctgggtgggctgcaagggccttacaatgagaactaaagatgggcctttccttttggtgaagttgggtatcagaagagagttaagtagcttttcccagtgtgagctcttggctcagttgccaagaagatattactccaagggcaacacttgctttcccaggggatgacacatacattttccttcttcctagactctgaaaatgtctttactctcactttaagacccatgcaagtcaaaacaaggcaggattcaagtggaagtcaaagtcacatgatttaagccagtattattagaattctgcattatggagtattaggcatggtcccaggtaatacaaatatttcctttgttttccaagtgttattattttgcaatgctatgtctccctcaagaaccttgtaagagaaagggtgatttgcatggcaggattctgaaattccttagccctcttgcagagtccttacctttattttaattctactagccagctgctctgtacatgaacctgtttatatcatgctattgtctacttcccttcagagaataagccgtggcagctcaagttaatacttgttttgaactttcatgtttcctgactcatttatcattgctaagccagtaggtgtaactggaatactttactgccccatccatctctgcatatcttcatctatgactgtttaataattgatgcaaaactcatgaatcattatacattccaatttcaagatactgaaacttctgatacaaatactcttgtgtttgcagcatgctctttggtaaggcagtttaaactggaaaatatactgctcaagacaaaataattttgtgatatggtaagaggatgtagtaataaggtagcaagtttagagataataacgtcatttgaaatcatgatccacagaaatcaattcatcaagttcaacatggctttcacctttaaattgtaagtttatatgacaattccacatttcattaactgctcagcctaatcatgctgttgatcaagaaactacaaacttgagcatttttcctctgttgtatatagatgtggataaagtacacaatgactaaaaacaaaagccagaaacagctagaaaggtcagatgtagttaaagtgatttttaaaggaaaccctgggtagtgtgaagtttgccttgctccaaatctatttgtgctgatttaatttccacaagatggtggcctggtaaccccatttctagctcaataggcactattaaggctgagtttattattttttttttaaatcaatctcagcatcctacaaaagttctagactggtaatttcatacataaagtattatttacctgaataatagatattgacttaacaatgatacgcatgtgaggctaatgattgtgaggcttacggaaacagaggaatctcctagttcatccctagtctcttgcagtatcatgctaggctggagtctatgcaatgccagagaattgagttgaggcaggcacctggattattaggtgatatacaactcacataggagggtgactgttttgataaaatggagactcagtttagacttaggatctaaactcaaagtctacagatggaatatcttactgaccaggtcactagcactgacctctcaacatcaatcatagagatggaaatgcaagggtaatgcaatttagttttcagagcccattaaatgttttatctttcatctaagaaacatttggtagataatatcataaagtcatttaccctacttgcatcagctgactagttctgcctactcaatacctggctttatttctgatgactggattgggttttggtagttttcgccttcagctaagataagaacagaaaatatatttcatagtgaatgataatggtgaaatgatcatagttaccaggtttgtgttgagaaggttttgcggggtcacttctaggctggggtgccatgattaatgggtaatgaatctgggtgggtggtgggggaggtaggatgtgtatcatttgtcatcccagcacagaggcttctagctagactggcaatgactactttgtggatcattaaacaaacgggattcttaggtgtcctgatgggaattacagttgttcctcccatccatataaaactgtggtctccttcttgggtcctggatcacggtccaaagtcagcatccattttctctgataaggtttactttaccaaagtaacttaccaagttttggtaactgaaatagtgcatttgagcatattttccacaaatagggggttggggaggggataggaaaaaagtctggttatggccaaacccaaatactcctactgggattatgccaagatgaccttgttgaaagatgttaatatgtcataaaatttagaaaataatcagtcaataaaacagtttatgtcaaatgattgcaattttgtcaaagtgttttcatttcagaatatatcttttctcttttttttttttttggcagagctagctgaggttttattttggacagaaaaacaaaacaaaacaaaacaaaaaacaattgaattgttttgtggctggaggcatgggcaaggggcgggggtccccaggcagtgaactcccccgcgggtgggctgagggctagggctgagcctcaggtaagtctcctgttccctgtgcttccttgcacagcagcctccctcctaggctttggggcagccgtaggaggggcaggctgggaggggctgccgcagctgttcacttgagcaggaaatcagaggacaccagcttcccatctcgggtcttgatcttcttcacaaccatggccctggtggagctggtgcggctgaaggagctggaacctgcgccagagcgagagctggagctcaggccgtagctgaggccagagcctgtgaggcccccataggccaagctcacaccacctgcatagccgctggtggtcttcgtatggatactcatgttctccatcttccagcagcttcctgtaggtggcgatctcgatgtccagggtcagcttgatgttcatcagcttctggtaggcacgcagctgccgcgccatgtcctacttggtctgctgaagggcggcctccagctcggacagcttagcgttggcatccttaatgaccagctccctgcgctgctccgcatctgcgatgccggcctccagggaaatcctcccgcctttgaggccctcagtctcagcctggagccagctgatgttccggttcatctcagagatctcagtctttgtaagacgcaggtcttcccagccagcgtctgcagctcctcatacttgatctgatacatgctctcggcctcagcccgactgcggttggcgatctcctcgtactgtaccttgacctcagcgatgatgctgtccgtgtccagggagcggctgttgtcaatggacagcaccacagacgtgtccgagatctgggactgcagctcccggatctcctcttcatacagctgcctgaggaagttgatatcgtcagcccttccaggcaagactccagctctacctcgttaatgtaagcttcatccacatccttcttgatgaggacaaattcattctccgtctctgtactcttattgatctcatcctcatagttgttcttgaagtcctccaccagcccctgcgtgttgccaagctccgcctccagcttcagcttctcctggcccagagtctccagctgccgcctaaggctgttgatgtagctctcgaatatgttgtccatgttgctcccagccgtcttctgctgctgcaggaggctccacttggtctccagcatcttgttctgctgctccaggaaccgtaccttgtcgacgaaggaggcaaacttgttgttgaaggtcttgatctgctccttctcctgggtgcacacagcatggatgttggggttcaccttcaggttaagggggttcagcaggctctggttgactgggacggcagtgatgcctcccatgccactggccccaccataggccaccccggaagctgctgctgcccactcaggagaagctcaaggagctgatgcagacaccaggcccactcgtgtaggagcagctgcagaaggcccgggtgccagaggtggacaccttgtaggacttctgcaccctgatggacatggtggaggcaggagtggaggcaggcgggctgaaccaggcggagattccagaaggagtggagaagctgcttcttggtagaatatatcttttctaacaggtaaagcaatatgtacacttacagaaacttctgttaatgacaaggtggcacttaaaatataaaactaagtttcctttacaatctgactctcctacaagtaattgttaatgactacacatacccacacactctctctctatagacaaaagtttatcagagagaatccaaaattgtactttttggtgtagaacgtacataatttattttcttatggtctttttctaaatcttcggtattttctatattttgccataaccataaatacttgaacaatttttaacttgtaaacaattttaatttgttttcaaactgaatgaaagattttagcactcatctcagcagctttaaaactttttaaaaatttaaaatttatatataggctgggcacggtggctcacgcctataatctcagcactttgggaggctgaggcaggtggatcccttgagctcaggagttcgagaccaggctgggcagcatggtgaaacaccatttctaccaaaaataaaaaaaattagctcggcatggtggtgtatgtctgtggtcccagctacttgggaggctgaggtgggaggatcacttgagcctgggaggcagaggttgcagtgagccgagatcatgccactgcactcacacctgggcgacagagccagacttggtctcaaaaaaaaaaaaaacactgtatatctgtatatctatgtatgtgtgtgtgtatgtgtgtgtgtgtgtgtgtgtgtgtgtgtgtgtaaaattcactttttgtggcatccagttctaaaggttttgacaaatgcatagagatatgtatccataaccactatcatgatatagaacaattccattgaccccagaaagttccttcatactgctctttttagtggacaattcttccaaaagaagtaaaattatgggaataaaatgaactgatagatataagagcttgtaagagttaaaaatgctgtgtagatacagtgtctctattgatatgactcaacttgatttggcaccaataattattttcttagtacacagagtcaaagattttttttaatctttctgtctagatgttattactatttgggattctgtttggatggtatggagctaaaaaaaattcatcaatacacttttgccaacctgcatccaagctacgttatccatgaagtattctaccttttcacctatgcccttgtctaaatggaactatgtttgagttcctgattcagtagcgttaccttcttaacttgacactgcttctcacactcatttagtttggtactaaagacagaagtagtaaatacacagttctgattacacatgccacatgcttgctatccttgacctactgtgtgtaatacgttctgtttgatccagaattgtttcctctgtcatccaatcagtgtctagtatttggatactgaatattcttcctttcatttaattaattctgtgcatactggttttatcttcaacctggtgctggtttacctcttagatgaaagaatacagatagaagggtccaatagctccaagtcccaagctcttatcacaatggctgtttcctacttaaccataagtgcagtattaaaaaatgggcactgcttaaatgtcagtctgaccctgtagatcaagcccattaatggcatgtgttatgtcatggcagatactcttggttggctactcctactcagaatctttcttccttgcctgcctcctactgtcccactgtagaggctggaaaacccacatacttgctttttagcctcccttgtggctaggggtaattgtgtgacccagatctggccaatgaggcatacaggaaagtctactggggaagcaggagcgggacagagattctgggaaagagttttcttccctgaataaaaggaagtaagtgagggaaggccttctgaccggactcttcattgcttcctgcctttgtttgtaattaaatgtgttcataatacgtggggctgtggcagccatcatgtgaccatgaggtaataagcctatggactttaaaaggctaagaagctgagtatgacagatgggagaatgggacaatatctttgatgacactgttgaacaactaaaacctaccttaagacagcctatgtctgaaattgttaaaccctgtggtttaagctactgttagtaagttttctgttatattcatctaaattcatgctactatacatgtctttccatctttgttttccttatagcactttgcacagggccaggttattaatgcatgttgagttggaaactcccttgccttacaacatatttgcacaaactctcacatgcacatttccactttactctaccacacaaccaattttccttcccacttgcttgattcctagtattaagatgatttgtgtttttcctccttcccctgctgtggagatggtgtattatttttcaaccattcagatatgaaagcagcttactgggatagaatgccaaccccaatttattcatggtgttcattgtaaaattatgacttcagagggacctagccacaccctctttaggagccaagctttccctgctaatatgcaggaagcccaccatgcttgctgagctgtgaaaatccagatggtgggaagcaggtgagtaatgaatgccatgctgttccccttaaaatgcacacagcttccccaggctgaccaaatctccaacactaaacaggtttgaatcaacccaaggacatgtgggttgataaagattgccttttattcaaaacaagttcctgcaacatagaagcctagaagataaaattttcccatagttggaacaaaacttgcctaaagggcaaaggagtcttaaaaattataagtctctgagtacagaaaaatccagtgggaaattgatagcagtccagacttgcctacatgcctgtgtggtttacagtggaatctgctgtcaaggtgtttaccatctgtcacccaatttttcaaaaagcagaggagtaattaactgctcaggcaatacaaactctgtcaatcattcagatctattatccgcacaacatgggacatctatggctgaccccaaagtcagcaggactccaggtccaaaatgagaaagttctcacatctgtgggggaatgggagttcttgggcaggccctgtgctacctgctacccaaacacacatattatggcatctggcacatgtttggtcagaaattttgctttgccagatgttctgaagtcagtaagacatggtatccactttgtggaagctaaaattccccatattttgggactggctcaggtatcacttccttaagaagccctgtgtgacttcttttaagcccaacacagctccctttattatgcagcctcattgctccccatactttgcctttataagttatcaccactaatcattagcatttatcacaatgatattagaatcatttatatgcctgtttcagtctcttcattgtaaacttcacaaggaacttgttcaccactaaaccctcagtgcctagctgagtctcttagtatataacagatgcttctcaatctttttttttctatgctcacaagtcatcaagcaatcaatcttttttctttaatggatcactgaatgggcactgaagagagccaataccaaagtggaccaacatatagagaatggataaccctaaacaaagtatcaataatcaaaatatgtatgctgggtagatgtaaacatttacttaagatgtgaagcaagaaaaagttctcatttggaatagtgagtgtttgatgattttagaatgagatacattgctcaataaataatagatcttgtcctaaaaagcctttgcagcactgtcagggattcagggtcctatgaataacaggaagagaaagcagatgggttgggggagagaggatgtccaggtagggtcctacttgggagagggcatggaggtggtaataagaaagccaaagtggatgagcaaatacatctgagatgaaaggactcgatttaatgaatgcctattatgtgcatgtcactgggctgggtaccagagatatagtaataaacaaacactactggtacttgcccttgtgaaactctcagttagaggactgggaggtaatgggaggttgggatacaagtacaatgttggggaaaggttgttcaaagattctgatcatagagatttttaagtcaaagaattttttttttcctagagggaagcagaagtccttatcagaactcaaggaaacacatctcagccatatccttgcatgcaataaatctcttttatttctctaaaggacaaattgaacactaaatacaatgcatatttttgttaaactgtaggtgggcctaaagaaatgaatgaagaatatgataggcaaggatttgattttttcctcctaaaacatgaggtcccgatgtcaaacaaaataaatatgttgctaatagttcacaaggtattattatgttacgatggtttttcaagggtcttagcaaataaaatggaaagtattagaaacaagcgtgccagttataataccatgaatcacttagtattttttctctttctccctccctccttctagtttctggctaggagttgtggtattttgaagaatattataaagtatgctctcttttggataatatgcatattttaaagcactgaatgcaatactgtacacacagtaggtaagagtaaaatacagaatgaataaactagtgttgattttcatcagcagcaggacccaatctttaataaatattcatcaggataaaggcagtatagtaaatacttactgcttttatctatccactgaaaatcggatatttagaaaatctattatatttgacttcatggtcatgtagcagtttagataacaatgaataatattaaaactagaaaagtcaggaaagatttaatgttaataggacataagggtgatctggttgcaacatctgtcaccccactgatcaccagggttgatttggctgatccggatggctaggcaggtgtctccttcctccctcaccactctgtgcatccctcccagagctgcacaatgggttgaagagcatgatcatccccaatagaggaggactggtcttcggtcaagggtatatgagtagctgtgttcccctgctagaatctccaaacaacgtctcaagatttagggttaattaattcattcattgacccatttattcactcaacaaatgtacattgaacacaccaactacgtgtaaagtactattccagatattaaagaaagatcaattaaaaatagataagatatctgtcctcatgcatcttacattctagttgtggagaaaagaaaatcatcaatgaacatattaaattacattgtatgttatgtactaaggaaaacaaatagagctgagtaagatgaacaggactggcattttcagggaggctgcaatttcaatagggtggttgtgacagacttcatgggggagacttgaaggagtggaggcgttcacgatgcaggtatctgtaggaagagtgttccaaagagatgaaactgacaatggaaagaccctaagagggaaatgaacatgtgttaagggatcagtgtgcctagagcagaacaaacaaggggtaaataggtaggagaaatgggaggttcacatgatatagagtcttgtataacacagcaaggactctcttactaaaagtgaaatgggcacaacaatgtgaatgtatttgatgccaccaaactgtatactgaaaaatagttaaaatggtaaagcttatgttacgtacattttacaacaaaaaagtgaaagggatagctgttggaaggatactaagtagacaagtgactgcttttacaagactcaatttggctacagtgttgataacagactgtagagggctgaggtagaattgggaagtgtattgagataatcaaggggagataaaccatggtgtaggctgtggaggtgaagagaactggctattttctggatgatattgaaagttgacctgtgaggatttgctgatggattgattatagggtttgaaaaaatacaagaatcaaggatgatcccaaagtttttggtctcagcaactggcatgttagagttgccatcactgagaatattgtgagtaaagcaggctttttgaggaccagatgttcagttttatgcatgtgaaatgtgagaggtttataagtacagatgttgaggagataactggaaataagaatttggagttcaggagaggggattgagctggtgatataaatttgggagttattagcattcagatagtgtttaaagcaacaagaccagatgaggtcttggggagtgagtgcattaaaataaatgaagaggaccaagagctgaacagtagggcactccaacattgaaaaagttggggacagaagaagaaaatccagggaaaaaaacaaagagaatgaccagtgagataataagaaaatcaaagaaacgtaatgtcctggaaaccaagtgaagttcagacaagtgaccaaccatgtcaaatactgctcataggcaagctaaaagtttagagtaaaactttaagcttagtactgtggagctcatttttaactttgagtaatgtatagtttctatgggatggtggccataaaacttgatcggagtaggtttcagagagaatgggaggagaggaattggagatggtgactatgtacaactccttgaagagtagcaaagaaatgaggtgaaagatggtaaggaaagtgggatcaagagagtactttcacagtgtcatagaaataacagcatgtttatatgctggtgggaaagttccaactgccaggaaaaaaataacgatgaagaagaaagaaggtggaattgctgaatgaataaaaaaataaatgtatagatgaacaggccaggaatgaggactggtcgccactaacatttgaaataaaatctgtacaggttcaaaccctacccacagccaaaatctggatagtaagaaaaatgctattgaaatcttctcttcatataaggtttaacaggattcttaaaacatttagtattacaagaatttctctcatatatcagcatttcagagatccatgtgattgctatgaataaaagacctcttgattttttttttgtttcttcctccttattctctccctctcccctgacctcacacctcttctttcttttctgctttccactcatctcttcctcccttcccttctccttttgaagctgagagcagaaaggactctgttcttttagctacctactatctgcctaccaggcagaaggctgctaactcatatacactttaaagtgatgagaaatctactacaagatcacttccacatgggtaggctgacctccttttggccttccttaactttcaccagtatccttaatatcttatagaaacaagtctgtcagagtggggaaaaaaaccctacactctcatcctttccctgtgcaagatttacagacacattgtaaatggccagacccaggtgatggtgccaggaactttccaagtgatttgtagatctcccttccaggacatcagtctttaatggaaaactcttttagctgcacattcctttcctgcagtatgactacaggtagagaattgcaactgtcataaagaagactcactgaaattaactagctattgacttggtctcaagacattacagtctaagagaaacaccagcactgcacagtttagaaaagcatagtttttctttgaaactaccatttattgagttggcctactgcaagccaggcacggcgttcgaccctctatatacatacactctcttcctaaatctatagatccatcgtcatatattggatactgactttggtcatgatctgtgctttgtgttttatgttatatcacttaattgtcactcaaactccatgagttttagtatctttctccatttttcagttgggaaaatggtggctcagacaggataaataacttgctcatgtttgtaagactagtcgtggagctgggatttaaacccaattgtagttccaaagcttgtgttcagaacctgcctttttgtgggctgcttcttttccctccaccttctattatttcttgttcctattctcttctgtatactatctcttcttttttctatataaattcttttttcatctttcactcacagttgtaggttttacttcttaacacagcagagtgtatcttctgggctcagtcttcacttttccatcattgtcacacactccatcaaagtttaactcctcagactctcaaagcaaatacaatctttgctgaccaactgttcatgccatttcatttatctaatatattcttgtcattaattgtgcctgttgacatctcattctttgagacagcatgtcccttgtgggcaggatcttctgcattattataatctgaggacctagcatagggactggcatctagtaggtttgcaaaaaacacttgtttactgactaaataaaaaagtaaatacacaaatccttcaaggccagctcaaatgtcacctattccatgaagcttttctaagcttcattgattggaaaaaattccttcttcctcacaaaaactgtaactctttgtacttttacatgagatccatgacattgtcacttacatgtgtacttgttctattttcctaactgaaatgtatttcattaaaggcagaattcctattttactcaattttgactctactaagcacaattaatgtttgatgaataaaagaatgtaaaatctgaacctttctctaataatacaatttagctcttaacctttattaggagatctcggacatctttgaggatccaataaaagctataaatcctttccccataaatatgcatgtacttatatttgtgaaattctgcatcttattttcatggtacttctgaatctctggatccctagtgggatctgagaccatcactcaatactaccctgcattcagacctttgcttaaacaattcttcaatctggaaattatcctcttagaacttatcctgtttcccttcccttctaacacccagttgaaaattattctcttctagaaaccaagtaaggacagtttacatttaaaacttcactaacttagctggcatcttcttatcaggcatgactcatttctattggattatggtctgaatgttgatagatggctcaaatatactttgtgtatgtgttatctgtttaactagattataagttccctgaaaacagaataatatttatttctttagtagaaagcatctttttcagtacctaggatcttattctgtgcatagcaaacatgacataaatggttcacaactggagatttaggattctcatggggacaactgactttgggtttatgtaatgcacatgacagctctctgcttagcttaaagtcacacatgttccatttttacctacaacttattgttatttttaattgttcattgctataggcttatagcctgggacacctctgaaataaaactagtatttgagaaatctagtaccaaggccattttcagaaatgctttctccaggaatagcagataggagaggagtgaaaatcagatcacatttccatacctccaaggactctatttttggggaacatttcaaatactgattccaacaacctaagttattgcctctggaggatatgaaaaagcttcaaacttgaaaaagtccataactattaaatgcgttggcaaaattcctttctttccaacacacaccatagcaggtttctagcactgactgtgatgcattgctttctgcaaagttcttggggaataaaaaatgatatgtcagtattttatcaggtaacagaaggaaccaaaccattaagcactgaagatatagactcaacactggccacaatctcaaatatacctcctgcttcttcacctgaacttgtatcaacagtaaaatgtactagacaccattttggggaagctttggggtaatacaaccttttggtaggtcatcattaagaacactttgtgaacgggccctttcctccctcgcaaactatcccctgacctccctccttaccattttctagccctacttttgctttcaggatctcataaatttcctgctttcccccttaatttggggaaacatgctttgcctaaactagtcccccgtcctcccttttccttagccaacatctcttcattttaaaaaatttcagcttgaacaacagcacttcctgagagtggacttttctgacaacctattttaaagtcttcacattgttctttatagtactctatcctttttctttaatgcatctaccataattcatcattatgtatattatgtatgtttttgagtgtttattgttaatgtctgtctcccttgtaagactacataattcacaagaattcataattcacaggaagcacagctgattttttttttaaccaacggtattcctggcccctagcccaatgtttgacacatagtagacatgcaagcattgttcaaggaaagtatggttttctaatcctatctctacaaaaaatacaaagattagcctggcatggtggcacacgcctatagtctcagctactcaggaggctgaggtgggaagacagattgagcccaggaggttgaggctgcagtgagctgtgatcgcaccactgtactacagcctgggtgacagagtgagaccccatcttaaaaaaaaaaaagtacggtttcctagaatatttattaatatttgtagcctgatcatttggattatatcctctaatgttgttcttacacacacacgtacatttggttttcagttgaattgagtgtagcagaactatgggatcatgaaaatttgaaaaccaataaaatccacatttgcttcattctagttaataaggtctatgctgagctaatcatatacacgaaaacacatgcattataaaatgcacacacacccttctgctacttaaattccagcccttgtctaaaccagtctccaccctttcaatttgcaggaagaaaggcaatcgaacaccagagactgggtgggaagatctttatatgccaagaagtctgacccagtgaactatttcagtcacatacgcagtttgaattggattgcccgatccctgagaagggatttctggattagacagttcattagaggctgagccagcttctagggcttgtcagtctttgctctgcatgcctggaattagcaaagtgatgcagtgaaggctgcctgagtgacagctgccagtgagtcacatgaaataatggctgaaatagcagctacttagaggcaacaaccacacctgcagcacagaatcccaagacgaaaatgagatttgctgtccattgaaaactatttactgagcaccttctatgtgcctgacctaggactttgtcttgagaaataattctaagagttgatcaatagcagtcttgtaatcccaggttaaattatagcttccacatttactagctggcaaatcttgggtttattatttaacctctctctctgccccctacttatttaatctgcaaaatggagatgatgatattatgttgagaattatgtacataaatttatgcaaagcacttagaatggtacctgacacacataagcactaaatgttagtatagtattttacctagaagtaacataatgaatggttaacagaatgactttaggtgtcagaaagataccattcatctctgtcatttacaagtgatgtgcctttgggcaagttacttgagttctctgaatctcagtttctttatctgtaaaataagaataatattggtaccattttggaggggaattatgaggattaaatgagataaggatggggaggagcttagcatgatgccttgcacattgtagctcctcaatatatataatttgttgttgttgttcccagtggatcactcatctggatcccagataaggcagagcaaggctccacagctccacatcatgggaccaaatagcccagaggataccagttggagtggataggtcatatctgacaagcagatttattttatttggactagtttattaacattgcagtattagcccacacaaaggtttccaacattttgaatgagtttctatcatctaaaaagtataaagtttcattttaaacaattgagatttttcagtttctttagaaaaatgaagattggcaacatcaagctggcattcccatatggccattcctgacttgagtggggaagcagctgctccctttagaagggcataggtcttgaatttactgcacctcctaacatttcctagtgtacccccagccttagtgtcaagtgccagctcccatttaccctcctgaggttttcctctacctctctgctttcatcttttacgctactttgcctctgtaggcatctgagttagcagctgctggtctttactgttgagtggtatcctctgcaaactggtacctctctacagggctgcatgcaaggtagcaacacctttatccacacaacgttaggtcatttgtcagcactgcaagtgcaagtatggaatgaaaaaacagtcaaaactgcaaatgcaagtgtggaatgaaaaaacagtcaaatcacaactaagggctggcctaaccagtaagctgagcacatccttggaggacagcctcttacccagaagttgactgcatgaattcactattcactcaccctgaatcttctccagtttcatttagactgagggtagaggatatgggacaaaggataggggtgctatacaacaatacttcaaaacttggttaatctaaaatatatcatatggaccattagttccttaagatgctgtttcttggggggaagatgtcgaacactgttgggaaatagctcatacactgtccctcatcttggggatttatctgggtaaatattgagttgtcccatcagaaagaagttcacccacagttcatacattaacagatatttactaaggacttacagatatttattaaggttttattaaggacttgccaggcactgttctttttggtgttggagattcagtattgacagtcaatattaaatctgaatattgacagattcagttcagacaatcctgaactcaggtaacttattctagtgtggagtaaagaagacttcactctctttccaaatttatctgactatagaatgctactgaaaaatactgctttatacatagtgcatagccacttgcaaatcctatctcttgagacttttcatgataaaggaatgatggagattttcacttctgtgaatacataagagaatcagaccactccaaaatgttttagagaaacagataatttattttttatttcttgaaaagtcaattaacccaccagagcagccttaatttggaaagaaccacagcctcacctggggactcaggcctggctaagttttctgagaatatcacatgaagggttaacttgacatttacctccaaactggagctgtttttctctgcctctaatatgaccctgttggaaatgtatttgtttttcactatttaatcttctgcatcacccactgttgattagatttaattaatttatgtttctaatgaatttagaaacttgcagtgctatagcaggaaaattttcagacagcatctggccaccaaatggattgattaccttgtctgcaaaagtctttcaaacatctggggcctgattttgtgaaacatccagaggctctttcaaaggtaagaaaacccacacagaagaatcttgaggggagaaagagagaaggtgctagaaataggtaggattctctttgatttgcaaaccaggatcctggcactctcccaacatgaaatcacattttgctgctcgttggcacagtttcaatggcaccaaatagactgatctgaatctattttgttcaacatcattggattccaccaggcccaagccaggctgccgccctgtgcgcttctttggcacttccttctatgtggaagctcccagtgatcattaaggcgaaacatttacagaaaacattcagagagaagcactttgctctcattcactcaacaaacatttatcaggagcccactgtgtgcctggcactgagccacgcatacctcttaagtagctcttgcaacaaccttgcaggataggtaggtactgctctcccattctcatagatgggaccaagtaataagtaaaaataacaataatcattaaggttaacaggaacactactaatatagatgtagagatatgcatacccacacagcaggctctgtgtgaagaactttacatgcattaactcatttaaccctcacaataaaaccataaggtagatgtcattattactacccccattttacagatgaggaaactgagtcactgtaagcttatgttaacccagctagcctttggcagaaccagccttctaacataggcagtctaacttgagagctttttgctataaaccactcaactttactacctccagatactatttactgaagacctgctatatgttaggtactatcttacagcttttacaacattagattttaatgacatttacgccatatgcagtggatgctattattcccagacaagaaaacaaaagcctagaaacattaagtaacttgttgaagtcacaaagagagttagtaagacttaggctatggcttaactcaggtctgcggagctacaaaggccactttctgcttactgagttatctgctgatgaatcagagaaaaaatgagtgttgagaactcaatagctttctcaaagctgccccaggaaacaaactaaaagtcagaaggcatagcctggctgctttgcacagcccagcccagtccagaaaaggggaagctacaaaatatgctacaaagaataagaaaaacagcttcatctaacagaagtaggtgaaatcttattgcctgactggtttttctggctcaaattcagagaaatgactgacaagcaagtgggttgcccacagtataaacaataatgaaaaagcctgcaatgctgaacatctgaaattttttgcaatgttgcacaatcaggttagtgcctaatacatagtataaaacacaattatatacagtaccagtgttgaagaaacccagtttgacatggttcttgtgatagaatataattactaagtctggccatttcttttgattaaaaaacttactttctttgacttctctcttgtctactgccactacctaaacatgaacaggtccttgctcctctttgggcctttgtatgtgcctttctctgcctggaacctggctaatctctattcatcctcgatcctcagattgtcgtctcttcctccaggaagtcttccttgactttcctattctgggttagatgcccattttaagcacaatgtatatttcctcctattatagcatttattacaccgtaaggtaactgtttatttgttggcctcctcattgagagagcatatgttggttaccactatattcccagtgtatgggtatggtacataataagtgtccaataaatatttaattgattggatgaattggagtgaacctcataacatcctctttgttggtctccctgtttgaaacctctcacctccacactttgtgctacatcccgtcagtcattcagctttcctttaaactttcatagtgtcattttaagaaatcacttccctttgaacactcacataaaagtcggaatactgataatctctgggcgagggagaattaagtaagagtgggcaagagaaaatcttacggagtcctaaaactgtcctgtacctttatgtgggtaatggtgacatggttgtatacatgtataaaagtcattaagctgaatacaaaagaataatgctcgttattgtgagtaattaacacctcagaataaacacatgaatcctttgaaagatcacttgtgttgataggataaaatccagacctccttgccccagttttcattgttctttactgattggcccaatggtcgatgtacttgttcaaactcacttttctaaaacacacgccctgatcttctaacaggtcctgaaacccttctcactcattcccatctctgtgcttaaaatcatgttttcttaccctaaatgtttatttctcttcctcccaccttacaaaagctcctccccctcttggagggccaggacaaattcatccatacaaactcaacaaatccacaaatctcattaatcccttttttctctgaacctttgactattttgtctgtttcattcattcgtgccaacatttcctgaggactgtaagttccttgaaggcagggatgttatcttattttcaatttttatatttaggacagtgcctggtacaatggtagattctcaatatatatttgttgtgaatataccaaagtcctacttacatgtccagaccctgggcagctatgagtctatacagagattaaaaaggcaggttgtctatgtcctttagaatgaaaacatagtggtgttaagcccatggacttaggattcccacatgatttcaaatccaggttttgcaactcactggctctgtgatccagtgtattcgatggccatcccaaaaactcagtttcctcagctgtaaaatggggactgtcataggtttttttttttgagggttacatgagaatataaacatttattttattagtgagcttttattgaatttgttgttttgctaaataatacacaattccacccaaataaaagcttatgcccttgatgttataatgcaaagaattcagcatagtgatcgactcacagggaacactgaacacatggtagctattcttatcagagctattataatccaaatatatagttgcagtgagaaaaatctataaattaggaggtaaaaatgtagaaagcaaggagagtggactcgttgtgagatatatacatgtgcacacaaacacagagtgaatctaatctgtaacaaattccttagggaaattccatcacatcccattaacacggtcccaaaggcaggagctgggctgatcttgacatatttaatatctttgaaaaaattctgaaaccataatcatctcaaaatggtatacaaaagcaagtctatctgggagttacatgcaaacacattttaccttagttctagcttacataattctttaatcatcataattcctagtgcttctcttaaaacttttgaccttaagaggatgattgacagttaggaaagggagaacaccgctcaatagggttttgacagttaggaagggagaacactgaggaacaagttctcagtgtgtttttacacactcatttaaaaggcaacagtttaataattctaattcatatatacttctattaatgcgatcaataattcatagaaattcctcagcagcatttttagtgacaacagaaagggtaaaatatttcttctcttccctttgccttcctttcctcacttagtcatgcctggagcctggagagcacacaatttcaagaaaacagtttccatggtgattcttcttttgagtacccgactgtattttgctctttctggagtgaattaatgcttcttattgctttcatgctaaatatattgcagattagatttgatttcctttgcagtgatatagttttattgcgaaaatggaaagtaaaaacacagcatgaagaacctatgtatttctgccactacactgtcagaaggctggaaaaaaaatccgtttcagaaaaaaataaccagccatagggaaatggatgcaggtatctggaagctaggatatgcatgcatgcatctaaatgttggaaagcctgccttagaagataatcttaattcttctataagttgaaggtgttataagttgaccataaaacactgagttacaagacatatcgatttttagtgtactatcctcttctcagcacagaaaatatatatcatatagaacaaagaaatcttcaaacccacaatatggcacttactttatattttattaaggagagctttgtttcctactaaagctaaataactggccttctttcacttgttaaaatagttatgtgaccttcctaagattcccatagcaccctgcatttcctgacatagaatttatcacatgtacttactatccactatgtccatcttcctcactagactctaaaagggcagggcccatgtctgtcctgttcactgttgtaccttgtgcctagcatggcacatgggaagctgaaaattataacaagaaaactatgaaagctaactctgaggcactgaggattttcttgtaaagcatcagtgggctggtgtgctggatagagatggaatctcatgtacattataaatactcaaatcttagcagcagctattggttttgatagtcagtcctacctggagccttgatcattacttgtctttgaggcactaaggagttaaagggaagaatccatcatgccagaggaggaggaacaaaaagcaggcaccatcctctaaagcctccttctccaccactgcatccccacctctcagagcctggagccaagcacttactgggcgtcaaacaagcaggaagaaaactaggattttggccaatttaagccaactagggagtattcagcatctatgccaaactagatatgactgtcctaggtgctgctgaggacaaagagtggaacacaggactttttggctctagcgagtttatagtctcaaagggattcttttgggattgtgcagaaggggagtatggccaagtataaacacacacacataccctgattattaacaatagtgaccatatttattgaacaacccattaggcacacttctaagcaccacatatgcatgaactcacttgatcctcatagcaaatctgtttattcctattattttcatttgacatataaagaaattgagactttgaaaggctaggtaacttgcctaacatcctaaaaccagttagtagtggagctaagattcaaacccacacagtctagtccttgagtcaatatcttaacaacaaaaccattctgaatctcaggctcatgggatctgatctgagaaatctactttacaaaggatttcccacagtctcttttgctgtataaattatccaaagtcgcttatgttcataaatgctcctggggaatcatcaggatgcatagagggccatatacagttctggatttcaagaggaaacccagttctgtggctatgtaaatgttagatttgcatggctttgtaactaggatacacattatggtaagatttctcctggctcaaggaggcgtttccataagaagggacaactggaggattactgaatgctaggtttcatcctatagaagagagacactctagtgttttgacacactctacaaaggggttcttttggaacttcattttctaaactacccttcagggaattcaaaattgctcagctgtatgctgaatttgattccacaaaaaacagtgacaagaacaaggtctcattgtattagctcacagatatttcccttcatttcagagtgtggattcctacagctatgttaaacatttatttaaaaaaaaaaaaggacaggaaggatgtggatgaagtcttaaagggtaggattatgagaggtgttttttttttacttatttaaaaattttatttttaattgatgaataattgtacatatttatggggtacaatgtgatatttcaatatacatttacattgtggatggattaaataaagctaattaacataactatcacctcatatttatcactttttgtggtgagaatattttcaaatctactcttttaagtgaaataataaacattggagacttctagaaggtgggaaggtagaatgggggtgagggatgaactattacctatcaggtagaatgtactctatttagataggtgcagtaacagcccggacttcaccactatgcaatagatccatggaacacaactgcacttgtacccgtaagtcaaaaagaaattttaaaaaaattataaaaaataaacaaaatacccaaaatctattcttttagcaatgttgagatatataatacattattaactataatcaccaagttgtgcagatctctaaaacttcttcttcttgtgtaattgaaatgttatatgctttgaatgacatcttcccatacccaattgctcccccttcccctatctcaacccccaactccgaaaaccagccccgggtaaccaccattttactttatacttctatgagtttgactttttttagattccacatataagtgagatcatgcagtatttgtgtgcttggatggagtttaaaattttacttttgctcttttgagataattctatttctcagttttctgtaataagcatgtataattttaaataccacaaagtaactcactcactttaaaaaacttttagtttctctgaatatgatggctagggaaacacttacttttttttttttttttttttttttcagatgcaatgatttcccagcaaaaggaaagcaaggacagggaatggagagataccaatgtagcaaatgttacctatgagatctcagaatcaggaaggggaaaaatgttttcttctcagtattatccattccactgtgtgactcctataaacagaatatttttaaataagaccttttccccatgtttagtaataagagagattatcacttattaagcagcaaaaacattgaataggtgtgtttattttttctctcagaagagagaatgggctcagagattatgttctgtacatgctcagagtcacagagttaacagatctccgtgggactgctgcactccacatcctgttggttaatactttgctctcctgtcttcgtgtggagcaaaataatcctccaacagttgggaagtgatatggtttggctgtgtccccactgaaatctcaacttgaattgtatgtcctagaattcccatgtgttgtgggagggacccagggggagttaattgaatcacggggactggtctttcccgtgctattctcatgatagtgaataagtctcatgagatctgatgggtttatcaggggtttccacttttgcttcttcgtcattttctcttgccgctaccaagtaagaagtgctttttgcctattgccatgattctgaggcctccccagccatgtggaaccatataagtccaattaaacctctttttatttccagtctcaggtatgtctttatcagcagcatgaaaacagactaatacagcaaattggtaccaggagtggggtgttgctgaagagataccccaaaatgtggaagcaactttggaactgggtaacaggcagagattggaaaagtttgaagggctcagaagaagaaaggaaaatgtgggaaagtttggaacttcctagagacttgttgaatggctgtgtccaaaatgctgatagcgatatggacaataaaatccaagttgaggtggtctcagatggaaatgaggaacttgttgggaactggagcaaaggtgactcttgttatgttttagcaaagagactggtggcattttgcccctgccctagagatttgtgaaactttgaacttgagagagatgatttagggtatctggcagaagaaatttctaagcagcaaagcattcaagaggtgatgtcagtactgttaaaggcatttagttttaaaagggaaacagagcataaaagttcagaaaatttgcagcctgaatatgcaaaaacccattttctggggagaaattcaagctggctgcagtaatttgcataagtagcaggagcctaatgttaatccccaagaccatggggaaaatgtctccaggccatgtgagagaccttcatgacagcccctcccatcacaggcccagaggcccagggggaaaaagtggtttccaggactgggcccaggtcctcatgctatgtgcagtttagggacttggtgccctgtatcccagctgctccagctgtggctgaaaagggccaacatacagcttgggcctgcggtttcagaaggtggaagcctcaagccttggcagcttccatgtggtattgagcctgtgggtgcacagaagtgaagaactgaggtttgggaacctccacctagatttcagaagatgtatggaaacacctggatgcccaggcaaaagtttgctgcaggggcagggccctcatggagaacctctgctagggcagtgtggaagggaaatgtggggttggagcccccacacagagtccctactggggtactgcctagtgaagctgtgaaaagagggccaccatcctctagaccccataatggtagatccactgacagtttgcactatgtgcctggaaaagctgcagacactcaatgccaacccatgaaagcagccaggagggaggctataccctgcaaagccacaggggcagagctgcctaagactcttacatcagtgtgacctggatatgagacctggagtcaaaggagatcattttggagctttaaaatttgactgcctctctggatttcagacacttgcataggctcagtaacccctttgttttggccagtatctcacattttgaatagctggatttatccaatacctgtacccccattgtatctaggaagtaactagcttgcttttgattttaaaggctcataggtagaagggacttaccttgtctcagatgagactttggactgtggacttttgggttaatgctgaaatgagttaagactttgggggactactggggaggcatgattagttttgaaatgtggagacgtgaaatttggaggggccaagggcagaatgatatggtttggctgtgtccccaccaaatctcaacctgaattgtatctcccagaattcccacatgttgtgggagggacccaggcagaggtaattgcatcatgagggccagtctttcccgtgctagtctcataatagtgaataagtctcatgagagctaatgggtttatcaggggttttcacttttgcttcttcctcattttctcttgccgccaccatgtaagaagtgcctttcacctcctgacatgcttctgaggcctccccagacatgtggaactgtaagtccaattaaacctctttttattcctagtcttgggtatgtcttcatcatcagcataaaaatggactaatacagggaaattaaacttatatcattaaaaagagaggtgatcagggaagcctgaattggcatgaggagtctgaccaggaaatgtagccaaaagatattctctgcattccaagaagaaaccgatgaggccttcgaggctcacagtggaaagggttagagaggaagattcagccatgtacgaggtgtgagtttggagagaaaaacacagattagatgtatcttcctgctgaagccatacacaacacaccagctggctccttttccaatccatgctctatcagctaatccaacaatcatattttgttattcttctcataaataaaatgttgtatgtgtgacaaagacatccctgacaggagactgcactccaagtaagttagaatgaatggtgacaaaaatgggatgttttcaggtatacagaataattgccagttactggcacttaaaatggctgcaaaatctgtggtactgctgggtacctgatgtttgctgcagcctcaggactctgatgcctggactttttcagggtcttatagtatccattggctttctgtttatagtgctaatggaaaattaaaattattttgcaagagaccttaactatactgtactatgagtactttatgtggcagagagaaggccaacttgcatttctgtatattcttctcctttccctcttcattttccgtggcttcccgtagagtttaactgactaattaagagcttgggctttgaagtcagatggatctgagggtcaaagcacatttctgccatctattagctgcaaaaccttgggagagtcagtcaccctcattctcaatttccttctctgtaaaacagtgaagaaaatctttccacttttcatgaaggaggtgtgcagatgaaatgacataatgcaaataaaggagctagcacactgcctgacatctgataaatcctcaataagttttaggaaaacaacaatgtaacacaactgacaagaatttggacagagtgggtatgtccattgaactttttttttgtctttcctctatgagaagtttgccatctcatcatggggtcatattaatttctctaactatattgttagctatagcctttctttttgaccccaaagttagagcgtaaatatctcccactaacttgatgattaagataaggtccaggaactttttcccgtttacggtttaaaaacaaccttctgtggagatttttgatggaatgtagggatatttatgactcaggcctcctggaaaagtccttgatgctgactcattcattatcacaagaaaggaggaggcagctgaaatcaccactcatttattctgcttctaacttacggtgaaaggtcaaaggtaagtcactccacatagggctgagtatgagaataagaatttcaataacttcttttgaccacaagagaaaacagcatttctaatgcacatacattgataaaaatttttgcaaggacctctttaatacaagtgctatagcactgataaatgataatatttagtctgaagcctcaggcttccagctaccaatacacagaaactacggtttttccacagagcaagtgaaaaccaatgggaggatggacaaaaatagaaaggaggcatgatttggaatttccacagtgactatggccttgaaatcaggaacaaagggcaatcttgcagaggtataagaggaaatataaaaggttttgtagaacaaacctggaagtgaattccagttgaaaccatgctcatggtaaaacatatttttaccacaaacaataacagcattaatagcactgtcaccatcagactataataggcaacaaatacaacatcaataaaatttattgtatgtaaaaagcttaggaatatgcaaatcaatagaagaggaatactactaagtaacaagtatttgagtactttgtgtcaagtgctcagctacaaactctaaatgattttttcatttactcctcaaatagcactatgagattgactccacctccatatagactgtagctggggcactccaggcttatagatgttatacaacttgttcaagaccacacagttaatgaaggaggctgattctaaagcccatcttctgctattgctgcttcagcaaagttgtgttgaaaacaatgctatctattggccataaattactgatacacactcacggcaaaaattatttttacatatttaacattattcttggctctagatacaggatataggggagaatatgggccgaatttggacttctaggtcaccatgaactctcagcatcacttcctttacaaatgtaaatcagtgggaggtgctgttcccgcaatctggttactcatattcttccctaaatatgcaagtaacccactcagtgcaagttatgtgggaacatgggataaaacttccagtatttccaaagtacagggctgggtggtcaaaaaacagtggcagtatgggactgctaaatgttatttggtgcaatgccaacataaatagttttgcaagatataaaattaattgggggtgaggggcttcttccagtttcaacacagcagataccccaacagaactacccttggcccatattttaaataaatgaataagctctctaattataaatattctaaatgagtaaatagaagactacccattaacatttggctttcagtaagaagtatgtgaactaatacaagtagacttgctaaagcttgagactagagagagaagatgacaggatactgaattcccatattaaagttgttctaagcttgggctagagctttagactaacctccctccaagtctagaattggcaaccagtttgagaaggtcataagtagatctggggcaaggaaaacaaaaccacacacagacacacacacacacaaacacacacacgtcatttatatggtagcataggctataattactatcatgggtgaattcagcttaccaggaccctactcaaggtctttgcaatatatgtgctggaaagtactgattttgtattgaatttgagtcatgacaatagcagcagcagcagtagtagtggtggtggtagtaatagtagacaataataacggcagtagtagcagtggtggtggtagtaatagtagtggtagtaataacagctaacatttattgagcatttccaggaattgttttaagtgctttacatatattacctcatagggttgttgtgaagataaaatgagttaggttttttttttttttttgagacagggttttactctgttgctgaggctggagggcagtggcatgatcacagctcactgcagccttaacttccctggctcaagcagatcctcccaccttcgcctcccaagtagctgggactacagatgcacaccaccatacctggctaatgtttttatttttttgtagagatggggcctccctacattgcccaggctggtcttgaactcccgggctcaagaattcctcctgccttggcctcccaatctgctgggattacaggtatgagcctggccattagccatttttaacagatggagaaactgtgttaaatgccctgtatacaatatctcattcagttctcataactacctatctactttattattcccactttgcaggtgaggaaactgaggcacagactggttacttatggtcctacaactcaataggttcaagaactagaattcacttccaggattgtttgatttcaaagctcatgttctgaactgctacattacagttttggtaccagtattacccctcatcctggccatattccagacaccccaccccctggccatgcttctctctcccactctgtctgtcctcgtgagactgagatgcagcatctttcaaactgagaccctctgctgtcaaattggataaaatcaatgtctacctcaaagtgctggtgtgacaaccaaatcctataacgtatagagaggatttgcctggtaccttccatataaagacctgatgatacttatgttttggaattctattagactggtgcaaaagtaattgcagattttgatggcaaaagctacaattactgttgcaccaacctaaatcatcacttttattacccgcccctttctctgccaatagcatttccttccagggatcagaaggaagctgaggatgaatttctctagaagaagtaagaaggccaagggttaatgtgtaagagatgaactgagctagatgagagggaaaggagaggtggaattgctttgaatttcattgctaggaaccgcgatcttttttattatttgtataaatcacttggctgtgaagacaccacaggccaagcctccgagtgtgccgatgataataaattgggtagcacaataaataacaggtaaaatcaggctgccaaatgaagcaggatttagatcatttaaatcccaggctatgagttgtcaaatccagtttaatactgataagtgtgggataataacttttagcaaacagtcccctcccaccaaaaccccccccacaatccttctactctcttctcccaccccttgcaaacagacagagaaccctgaggggatttgcagaatgaaaaggcatggtatatactgaccagatatgagtccaagttattacataataatcccagagcctcagcttgggctgagagcaaataggaagagctaatagaatgctgcaaggttcgattagctgcaaaggagattctaaatcagagcaggttttatatgattaaattggatgggggaaaaaaagagtctcacactcaggtataatggaaaagtggaaaggataagggaaatataaaaccatggacgttgctggaatggctatggagtggcctgagggtagagtcaacgctgagggacacttgtcaaaacaagagacaacttagccagcagttctcagtagctgtgactgttcttacaagactcacacccacattcagagatatagcagcaggatcctacctgatgacactggaatttcaggaataaagagtcatctattgcttgatttgatgatgataacctatttcattcattcaacaagtatttattgaataccaaatatgtggtgggcattattatttatgattgcataaaatagactgtgatggtgactgatttagtttggctgtgtccccacccaaatctcatcttgaattgtagttcccataatccccacgtgttatgggagggaccaggtggagataattgaatcatgggagcagtttcccccatcctgttcttatgagagtgagttagttctcatgagatctgatggtttcataagcagcttttcccttcactgggcacacattattctccttcctgcctccatgtgaagaaggatgtgtttgcttccccttttgacacgattttaagtttcctgaggcctccccagccatactgaactgtgagtcaattaaacctctttcctttataagttacccattcttgggtatgtctttattagcagcgtgagaacagactaatacagtgacaataactaacaactgagcgttatgccctgccacatattttacatgcatttgctccttcagtcatcacagaaatcttatgatctagttgttattattaccatcattttaaaaatgagtaaactgaggcccggagagataactaacttgctccagatcgtgcaggaagaaatgatgctgacatccaaacctcatatgtctaaagcccatctgctttaacatgcctccaaatgaagaagtgaatcatagcagccatcgtaagtcttgaggacatctctgccatcttcttcccagcccccagcaccaccccctttcctaggtgtgtacatgggtacatcccacaattggtatttgaactaaagtgaatgagaatgttctgactccggtgtaatctgttaattactattaataccaccatgagggcacaaaagcaggattgcagctttgtgttttcatccctgctcagtcattacctagtggtatacatttctggatcacctttggcatctctagttggttctttttagaacctataacatacatttactctctaacccaggactgttcaatagaaataatgtgagccatatataatttttaattttctaatggtaacatttaaaaaataaaaacaggtaaaattaatcatatatagcattttatttaactcaatttattgaaatatccttttaacatgtaatgaatacaaaatattactaagttattttactgtcttattttcatgctaagtcttcaaatcctggtgtgtatttcatacttacagcacatctcaattttgactagccacatttcaagggttcagtagctactggggacttcatactggcagagagctttagctgcactgtgaatgttcattgacttgtcctgattaggacaagtgccttctaggcatataggagctgtgccttctagtagtattttttgggtgtctacttcatgcaaagacctagagtgggcattttgatacatattatgcttcatcttgccagtagctttccaagaaaacatcgttggctccacattacagataaagagcctgaagaaagttactggaagctccaagactgtagagagtatttacttttacctctttaacacttagcacattgccttgcacagagcatgattcaacaaatatctatggaatcaatggaaggttacttgtcaaacctgcagaagagctgggatttgaatcaggtatgcctgattttaaagcttgtactttttgatccattccgcttttttttgccacattagtaatatactaatttgcccctaagtaatatacagtgaagaataaacaatgcttatttagtatataagcctttcatcccagtgaaaaaatttataaatgggaaactccagtcaggtgttatatttatggtgggtgtcacggtcttctttgagtgtatttggtttaacaaatgttgttggaggccaggtgtggtggctcacacctgtagtcccagctacttgggatgctgaggtgggaggatcacttgagcccaggaggtggacattgcagtgagctgagatcacgccactgcactccagcctgggtgacagagtgagaccctgtctcaaaaaacaaaacaaaacaaaaaaaacgttgttagaaacctactcagacctggggactatgttcgaccttgaaggtacaaagaccatcaacacatgattgtcactctcagtgtggtttggaagatatgccatagagtgtttagtacagttaggtgatataaaaaatcttagcttcgggctgggcgcggtggctcacaactgtaatcccagcactttgggaggctgaggcgggcggatcacgaggtcaggagatcgagaccatcgtggctaacacagtgaaaccccgtctctactaaatatacaaaaaattagccgggcgtgatggcgggtgcctgtagtcccagctactcgggaggctgaggcaggagaacggcatgaacttgggaggcggagcttgcagtgagccgagatcatgccactgcactccagcctgggcgacaaagtgagactcagtctcaaaaaaaaaaaaaaaaaaaaaatcttagcttcacagaaaaactagttggaagtgactttaaacgtcatcttattttattcataatttggtactaaattacatactagcaagatttcacctggggaactcttgtattcccaacagtaggttcttgaaaggagggagaaatacatctttactccccaaagtattttgcacagtgttaagcaaatgacggttgaacaactcctagttaactgccctcagctctctgtctccttctgtgtgtaccaaggaaccaagagtcagattcctcatgggcagagagcaccttggtcagatgtcgttaaagttctaattatagaccatacttctcagggaggatataggtagagttctttattctagcttatactagagaacaataaaactaattatactgagggttttttaatcagattaattcataaattaattcaaatatttattaactattagtcattagttggtgtgactagaactgtgaatatgatagtccctgccattgaggatattactgtctggtgagggacacagactaatgaagacacatacattgtaatataatgcaataggaattaagataaggataacatctaagaagtgcacctattttttttttaagagacaggatctcactgtgttgcccaggctggagtgtagtggtgtgatcacggctcacagcagccttgacctcctgagctcaagtgatcccccatcccccgaacctcttgagtagctaggactacaggtatacaccactgcacccaaatagtttttatttatgtaaagacagggtctcaactatgttgcccaagctggtctggaacactggggttcaaacaatcctcttgccttggcctcccaaagtgctgggattacaagtgtgagccactgtacttgggaagaagtgcatctaaatggaatttagagaaattaggggaagcatcgtggagaaagcattccaaacccagtgttaaaagacaaatgagagtcagcctggccaaagggcaaaggatggggaggaaagaatgccaggggtgggggacaactcatatgaagactcatagaacatggtacatttggggaccaacagagatttcaatgagacggaagcatggagtgccagggctgggcaaaggaaggacacatgttcagaatatattagagaagtaaacttgaggttcatgaggaaggtctttgtgcatgataggaagaggatgcatcaaagattttaaggaaagaagctacgattataatttaagcacattttactctagccctgctgtgtttcatgtacttctcacattccatgatcactatttatccatctgcttccatttctatcctgagatccttaaaacaagggctcctatgtttctctttgtatcaccagtaccccaatgcagtgtctgctacatacttgatgcttaatacttattttaatgaataatgtctgtgggaatcctttgtagatttgagggaactcagtctgctgaggacatactaccagggagtatccttaacctagattccttggacctcttgaaaatacttggaaaaatgtgggtgcgaatatgtgcattggttttaggagtgagatattatcattttcatcagattctcaaaggaacctaagacctcacaatgattgcaaagcacaataaatggggatccttgggaaatgtagtttgggagccctctctagctagaaaagacttctcagaggtgaaatgctaaatggtggttctcaccaaaggtagaaaaatgaataggtgaaatgttgatgtgacctaactttttccaagtgaaagaggtgtacaagtgataaaagagaacagctctgtggtgacaagataatgtttgcaagaaaagagaaaagaatcttggagatgatgggcaatttcccttatgtctcctaagttactaagagcacctgatagttaacccagtctttaaagaagagtgctccaggtagaggtgtaaataaggagctttgaaaccaccatgggaagaggctgttgtaaatgaagggctcttggagtcagagaactcaaagaaaaagttgttacctctggaagaaaaaggtcttatggaagctacctccctctttcttttccacaaatttggatctgccaaattaatattttaaaatgagatcacacacacacacacacacacacacacacacacacacacacacacacacagataaaagttcttgatggatgccattaaaatatatagggtaattccatctcagtgctgaaaacctgatgatttttactcacactgtctgattattttttcacaatgagcatattttttcacagatgaacatgaaaaaaaattccattttgaaaaaatgatggtaggataataatgcaaaaattagtgttctaaaagaaagaagatcataggagggcagagtgctgctcaaagtgtgtctcataggccatgaagctcacaatcaccaaaggaacacattaaaaatgcagattccatcccagctactcaggagactgaggcaggagaatcacttgaacccgggaggcggaggtggcagtgagctgagatcgtgccaccgcactctagccaagcgacagagcaagactccgtctcaaaaaaaaaaaaaaatgcagatttttgggtcccaccccagttctactgaatcagattctttaggaatggggatctaggcatccgcaatttgaaaaattccccaggtaattcctatgcttatcacagagattttgaaaaaacctagttgataaggatggagcacatgcagtaaggaaggttcttgtctagcaggcaacccccctttctccatgtacatatgtgccttggacactaagagagtacaggacagagatgagcttaatacagtgtcttaacctaatgaaactgatttttttcaccttctaaaacattttcttatacattaaaaatgtacttataatctgaagttggacatgttggtgtcaggggaaggtataaattatgaactgacagtgctgcatattcataaaaatcccgcctttctaggagtggagggtgaaacactcccggtgtccttgtagatggcatgcttcttggacacctaaggatttttctactctctcacccctctacagggcaaatgggaatccatagctaggggtataatacgaagggcgaccgcctctcgggacgtggggacagaactcagagctccgagaatcatgccatctcaagaaggactgcgtcaccacctgtcaggtttgtgagagctgccactcctgcctgtgctgggaggccagattctgatactgacagtacacaattttaggccacataacttttaatgtagtctatcatgtcatatttgatacatccttgaatgtcatcctaaattatttttgaagcagagtacagtaaaaatattctggttcaacaagtctgttttgacagatcgatattagcctagtatccaaatataaacaggtgaactgaatgctgtttctatgcctttaggtaagaaattatatttgtgtttgtgtaggaagactcgtctgggtcttgggattttcttaatcgagcccattagactatcttcttgtaattatctcaggggccaatctgtctgtgtaatgggctctggaggaatcaaaccttcacgttcttacaaaggaaaatgttatgtatgtgtcagaaaaaaatgttttgaagaattactggctaaccatctcaacagccgccggggggaactttgctgtgatactgcaggaaattgttggatttgagactatattgctccaaagggtatttctttttttgtgggctttttaataaatctaaaatgcgcatgaagcctctgatgcaggggactccacaccaactgcctccttactgtatgaaaggataccaaaatcttaccgttggagagactgccaacactctggatggctagggtttaactaatgactagctatgctgcttcactgaattgggctggccagttgttctggatccttttacctgaaacattaatgtctgaatatggtggctatgtccaacagttcattattacttgaagatattcacactatgcattgatattctgatttcttcacctccctacttttttctgtttttgcgaatttttaattctctgcagggtagagaatagatttatagtataaaggaaactatgaaaagctaagaaataatgaagatataataataaatgataataattattatgggttgaattgtgccctcccaaaatttatatgaagttttaacccccaatatctcggaatgtgactttatttggaaataagagtcattgcagaagtagttgcgatgaggtcattagggtgggtcctaattcaatatgactagtgtccttataaaaaggggaaactgaaacacagagatgggtatgcacacagggagaatagcacatgaaggcgatgaaggcgaaggcagagatggggtgatgcatctgcaagccaaggactgccaaaaattgcctaaagaccacaggaggctaggagaggggcctggaactgtttctctgtcatagccttagaaggaagtaactttgccaacaccttgatcttggacttttagcctccagaactgtgagacagtacagttctgttatttacaccacccactttgtggtactttgctatggcagccctagcaaactaatatagtaatacacaaaccaggtcctatggtaagcactttgcttatatcattttactctcttaacaacagccttttggtctgaagattgtcataaacgattgatgggtggaatggctgggtgggtggaggaagaattctttttcttcccttttcaccattcaaataggatttttcaacatatgctggactgaaaggacttgggcagtgatgctggatttatatattcccttcatgtgtgacttcaccagaaatttataaaactatcatgcgaggctaaaggaaggcatcatattcagcactcccttcacttgtggtacataaaagatattctttacaaaagaaggaaaaggtgaggtggctgctactcacctaatgagaaggaattgggattaaatttagcttagtgactctgatggcaatttttacttctggactaaatgttatgaccttctccatccccacgtctaatccagttcaaattccttgagcactaaggctctatatgctttaattttattattattatttccctttcagattcagtttaaaacttatttcatttcccttcctgtcaagtttattttccccaagcttcctttggaataggccctttgcagtataagaaagaaaacaggcactaaactctaaaggagaaactgttacaccaagtcgtaagctaaaatgtgcctcaaatatggccacaaaattattgagcaaatattgctgccaatcaatctgcctccatagtgggtggtttacagccagggttaccaagattaaaactaggaccaatgatgtgcaaaagtgggcccaactgaccttattgattatttcccactgagagagaatcacaggttagcaggcagaaatcaattcaactgcattaagttaagccaagtgtagatttattcataccatgcctggaaattataaagtggcaaaaaatatttaactatacgtagtatacatactaacttacaaatatatctttaaagtacatagatgcttgctccttcctccttttcataatatttaaaaatctgaaataaaatatagaacataaggctgttcctgcatttcctcccacaccatcccctgcccccacccttttaaataaaagaggttatttgtgaatgctcttaacatggctacttcagccacaccccagatttcaggatggagtggcagagcagatacagatatgtctccgcagccaaagaagcaatgaaagctatttgctcttgaggaaatcatcatttttggctttttagatgaaaggaacttggcccttaggcttcagtgcaccatggggaacacagaattcattctctttcctcctccagtgacaacacacaggctgggactgaagagagctttcagaatgaacaatgggtggaaaacactgcccttccagcagtgagaaatgtgaaattccactcctaccctcacatgtgtcaccagggaaccatcctgtgtgctccatcagcactgggatatgagccaggcaatcatttgtactcagggactcagccttaacctaaaaaatcatcagaagagcctaagaagggttcctcctcattcctcatatctgagaaacaaagaacaacacattttactgcaagaaattgtttgtggatcttattgagaatagcttagagcttgcttttcctttaagcaggctatctacttcttattctgcctagccagctaagatatttatctcctactttcatggtcattcacagccacccagaactttcaaatgcattgctcagggcctctgggggtggcctgtaaaccaacaaaaatacttttatcaaacacaccatagagatcaggcagttaagagaccaagagtcaaatttatattcagtttagaatataaattgtccattcccagttcaatgggaaaatagataattgaccaaaaccctttagttgctcaaagctgggcactgtggcaatagaagaaacctgtgtctttgcagctcagtgtcagttgtcttgactcattttcccccaactctaaaacgtgcagagaaagacagagagagagagagagagagagagagagagagagagagagagagagaaagagactataagcatggaatgatgtgaagaacactgggtcagccagtgggcctgagttcttaccctagttctaccacttggtaaccctgtgcccttgaacaagctctcaactctaaaatgtggcaggatttcaatcaatattccaagattttgagatttttggccataaaaatgggatctaaagaagatctgatttgcagggttgttatggaagatctagaaagaaaataaatatatcagcattttgtcagctgttaagtgaaagacgaatgttagttattgtcatagggataagagaaaaatctttaagaacttactatgagcagcctggcacaattattagagtcctctagattggtaagtcactgaatctctttgaacttcagtttccccacataaactgcttgccttctggcatgaagagaaaatgaggtaaagaaagtatgctttaaaatgataaattgtcggccaggtgtggtggtggctcacgcctgtaatctcagcactttgggaggccaaggtgggtggatcacaaggtcaggagatcaagagcagcctggacaacatggtgaaatcccatttctactaaaaatacaaaaatcagccaggcatggtggtgcatgcctatagtcccagctacttgggaggctgaggcaggagaattgcttgaacccaggaggcggaggctgcagtgagccaagattgtgccactgcactccagcctgggcgacagagagagacttggtctcaaagaaaaaaaaaaaaagataaattgtcctagaaatgcaagcaattgttatctagagaactcattttgacttttggcattatgatgcacacacagttagttcttggctcaatgacagactttaattggcttggctatgaaaaccttatagcgctattatgtgctacacctgtgatggccatgcagcgtgttaatcaagacaattaggctggggacccagagaacggctttccaccactgtgcataatcctcctcactttgaaagggaaattaactgctgctttatggtctctcatattatctcactttcttggagagagatcccaatcagatccaccttgactaaacaacacctatcactggcgcatgggatgacacaacatctgtattaactttgactttgaaacagcttttggactgggagtttaaaaaaaaaaagtcatatgtagcaatcattagacaaagcagccactgggtgacagccagaatcagaggccagaaagttgatctctttcaagtgacatattccagaggagaaaggaacaggaggatgagcagatcaatttagctctcaaagtatttattctctagcctgcaaaaggagaacagggcttccaggacgactctgtctgctcctcaatttctcactacaattataaaatcttttggaattttcttccttgcgctacccctgctatccccatttcttctaagaagcatgagaagtatattttgttgtttggatttctttcactcttgggcaaagctgcttgaactgataattagtgattttaaaaagcagcacatctaaatggtggctattcattaatcataacattctgagtttacatgcatttatcttattaaatgctgtgagataaaagtgctgtagggatatttaaactcccattatgcagataccaaaactgaggctcaggaaggccaacctaacaagttcatatggcgagtccgaattttcattcgggtctcttggctccaaggcttttctataacatcgtgctgcatatcatctgtggaggaagcattattcaagggctaaggactaggctcaatttatttctgtggctccagtacctacaacagtgcttgtcaccttctaggtgcttaatgtggaattaaattttaagaggagcttcccaaattgcttaatatctttagaataccaggaaaaaaaaggtccagtaccccattcctaatcatcctctgctatcgctgagtcagaaaaaatggctcttgtctcccaatggtaggcagtttagctgtgagaccatcctggggacatgggtgtagatagaagcagatggatcatgacaactggaaagatcccagtagagcagctttgggccttagtctactttgctttgctctggaagaggccaaaatgaactgttcaacctataattcccaatttatgcaccaaagcactccagggcatcatggcatactcacagggatgctgcaggatattttaaattttgagtgaacaatagtgatattaaacctctgtcagataatgtgagaatgaatagcatgagggaacttaccacttcaacattagtacatagtatattccccttaattacaaagtatttttgcaaagctggagttttggtagttaatataattaaaaacaagcactgcatcaaaatcaatgtggagcagataatgaaggtgacagtattcaatctgattccaaggtttgggaagtggtacagactattagggacacataattccattgtaagcaattgtagttaagaatgaaataaaattatttcttcaatttatgttactatgtttcaaacagttactacattgttagtgcaaacacacttattaagtagtttgaacctaactacttagtaaacagaacagttgtgaatttttttttggcccaagaacagcatgaaaaaaattaggacgatacgaagggtgatatgaactgaggtacttggggaacctctgttctacacaaagcatggtttaacccgagatgttccagggctgaacctgcctctggattctctatgtggtacagtgacagccacaaaagcagctcccatctactgagctcttggccaaacataggcaagctcttaagcattgtaactgcatgacctcatttaatctccagagcactgtgagcatgggtcttttatgatccccatttaaccgatgagtaacctgaggccccaagaggctgcccatggtcatttagctagtaagtggcgtagcaggaatttaaacccatggctggttgatttccaaagcttgtacttttttttttagaaaaattaagcttttaattttgagattcacatgcaattgtaagaaataatagagagttactatggaacattcacccagttccccccatcacaatggtaacattttgcaaaactataggactatatcacagccaggatctgacattgatacagtggagatacagacaatttccatcactataaaaatctctcctgttgccctttcatagccacaccagtttccctccagtccccatcctttccttatcccctggcaaccattaatctgttctccatttctacaacattcttgaaatgatgaaatcataaaaatggagaacagattagtggtcacctggggttaagaagaggtacatccagtagtacataagcttttggaattggcttttttttccctcaatattttctggagatgcattcagattgttgattgtatcaatagctcattcctttttaattgctgaatagtattccatggtatggacgtaccacagtttgatgtgctgttcacacatctaagaacatctgggttgtttccagttttttggtaattatgaataatgctgctataaacattgtgtacaggtttgtatataggtttttgtgtgcacatacattttttttatttttcaaagacaaatacccagaggtgcaattcttgggtcatatggtattatagtttcatgtttaggtttttaagaaattgccaagttgttttccagaattttttccctagaatattcagaaggtacattttacattcctatcaaaaatatatgaatgatggactttctctgcattccagcacttgtattgctaccatttcattttagccactgtgatagatatgtatctcattgtgctttaatttgcatttccttaatggctgatagtgttaaacatcatttgctgtgcttattggtcatctgtctatcgtctttggtgaaatatctcaggtcttttgcccattttctaattgcatttttttaatgctgttttgagagttctttatatattttggtaactagtctttgtccgacatgtggttttcaaatattttcttccggcctgtagtttgtcatttaatcctctaaacagaatctttggctgagcaaatgttttaattgtgatgaggttcaatttatggacagtgcatttagcataagaactctttgcctagcctagatcacagtgcatgtagcataagaactctttgcttagcctagatcacagtgcatgtagcataagaactctttgcttagccttgatcacagtgcatatagcataagaactctttgcttagcctagatcctgaagatttcctttttttcttttcttttcttttttttttttttttttttcgagatggagtctcagtctgtcgcccaggctggagtgcagtggcttactgcaagctccgcctcccaggttcacgccattgtcctgcctcagcctcccgagtagctgggactacaggcgcctgccaccatgcccggctaattttttgtatttttagtagagacggggtttcaccgtgttagccaggatggtctcgatctcctgacctcgtgatctgcctgccttggcctcccaaagtgttgggattacaggcgtgagccactgcgcctggccaatttccttttttttctaagaattttatagcttcacattttatatctaagtctgtgatccattttgagttcattaagattaggttgagattaattttgtgcctatgggagttcaattgcaccagtgccatttattgaaaggctgtctttcctccgttgaattgcttttgcaattttgtaaaaaacaaacaaacaaactgagttgaacatatttgtgtgggtttgtttttggattctttattctgttcattgatctatgcctctatctgtctgttaatgttacacagtctttcatactatagccatataataaatcttaaaatcaaggagactgattcttcccagtttattattcttttaaaaatgatttttagctattttggttcctttggttttccatatacattttagaataatcagatctgtatttataaaaatcttggtgggattttgatagcaatcacattaaacctatatatcaatttgggaagaattaacatctttgcctcgttgggtagacaagtcctatgcctttataaacacttttttattttaggacgaactagggtaacaaattcagttgctcaaaagaggccgcatgtatcaggtttaagaacatgcaggcttcttgtgatagtagattggatacagaatatttctgtactgtaagaaaacaataactcaatcagatgttaaatgaccaggaacacttgagctcagcattagaaacataataaggaatggtggggattgtggcttgctggaggaaagccatgtcccctatgaatggagcagttgctacccaagtcttctcatggttaagaacatgggcacagcattgctatggcttatatattttcaacataagccagaaatctattttttaaaaaacctaaaatgttggcacctactttgaattaacataaaataaaacagttcaaatacacacgttggtacgctggatccagcagcctctctgtggtctcagaattagagacaacaaagaaggtccccaccctcagggaacatacactccagctggagcagcagagagacaccacaaagcagcactgttctgctctcaacagtaggagctgaagagcatgcagggggatcctgaactctgccctgggaggtcagggatggctccccaaagaagtggatttacacagcaactccaaggagagacatttggaaccaagctgtaagcacattaggaaagagtaagggatactttccagagaatccaaatcgtggcatgaggtactcttgagaaggttaattcagttgatgattcaacatgtgctatttaatccattgcctccagagcaaacattgataggattaaataacagtgcagagctctacttccgggcatcacagaacatagcggggaagaggtcatagagttcagtgtttctccaagtgttatgtcacctgttgggaattgcaaagctaaagctttccagaggtgaacagttttctgatgctcttggaagaaaatcagagccccttctaattactcacaaggacctatgtggtctggcccctgcctgcctctttagcctcctcttctctccttattcctgtcttctttctgtctttgcagcatatcatgactcaaggcctttgcattttgtcattctttcatttattcttctgtttattcaagaactgttgattgaatagaaataaatattctaggtattgggaatacaacagtgaacaaagtcaactcagttcttaccctcatggagtttacattctaatggaggaggaagacacacatagataatatcctgccttgtgtgatgagttctatgaagaaatattaaacagagttaagtcatagggaataatggtgattgcccccagagggtgggggcaggtcttctggtgaacatatgagaagaacttgaatgaagtgatggagcacaacacaaaagcacatgggcttttccagaaagagaaaactacaagtgcaaagagcctgacgcaggagcacatttggcctatttgtgggtagcaagaaggggagtgtgctagggcagaagagtggcaggaaatgggggtagggaggaggccagatcatgtgaaactgcaggccttggttagcactgtggcttttaccctcagtgtaaggaggagccacagagacatgatttgacttacagagaacagatggtggatagaaatctgttacaagtttattagaaaagtccaagtgagagatggtggcagcttggactagtgtggtagcagtgagggtggggagaggctgatcagcttgagacgctgtcaaggtagagatactgtagggttgccttgcacttgccttggagtatgagaggaaggagtcaaggatgactccaggggttttgttctgagtgatacatttattgagatgaaaaaaagcagtgcctgtaacatcacaatgttggctccttatcatgattcaggtctccatcgaatgtcttctctttggagacatcttccctgaccacccctcatcctatcagtgctgctcattttatttctcagaacttaacacatatctgaaattatcttattcattttatttgactcatttatcatccggattccccactgaaatgcaagacctaagagaataagtgccatgtctgcttagtttattgcaatatctttagtacctaattcagtgcctggatcttgaaataagatcagtaaaagtttgctgaatgaggtttgcaatgtgtgagataagttaagtccccaggtttttggggtgtgtgtgtgtagttcttttcagagcaatcagttaatggattaaatagtattgattatctgtggcaggcactgtgccaggctctgggaaaacaaaaatgagcagaaaaaaagcattgcctgcagcctcatggagcttccagcagcctggcagagccatagtaaataatctcaccaacagactttcactgtgctaaaaactctgaaggaaagacacatggaggtatgaaagtgtattatctggggatctgatcacttcggggaacacaggtgaaacttctctgagctgagatccacaggagaagccactgtgggcctcagggatctctgagaagcatagatgctgtggctatgacttcaaatttttcatggagcttcttgtggaaagaaacacattttggcaaaagcagaactagtacaaccttctcaagcactggggcttagctgggttcagaacctggataagatgagcagctgctccatgacagaactagggttttgtatttatcatgacacatgtgggtaaaaagggaatgctacctacttaacagggctgctatgagaaggaaaagttattgtccatgaaatgcttagcacagtgtctggtacacaagaagtgcaaaatacttggtaataattatcatcagacttcaaatttgtgagggtataatgtgaatactctcccacacacagagaatagacagtatagaaccttacacagagcaggacctcaataagtttgtattgaataaataagtgctggttgccttggtgacacaccattttgaatctgaccaaacattttcaccaaagatggacacagtaaataagtagaaatgaactaggccagttccttttgtcagctgtctcaggactggtagctgacattaattattgatattacagggagggagattcttgccagccaaggacacttggcagcttgaatgtaaggaattcggtctgatgctcggttttaaactaaagataagtgagaagtgggaggacccagaggattcgatgattttatgcatcaataatacttgccataggaaggctcagccagagtccgggaatagctgctactgaaatggcattttccttttcattgaaatccacatgcttgatttgtgcatgtgacttctcagctgctaccataatagaggaagtggttttgaattaacactaatcaacctgaatctccaggggcaacttgtacctgaaaacctccaagtcctttgtaaacagcagttaagcttccctgtctcctgagggatgagcttctggatttttgcttaaatcaagcagaattgtaggaaagaggttgcaattatgagcaaagtgggtgtcagacaggataatttctcatcataaatccaggcttgaaaagggccaaaaataatctgaaagtccccaagatattttgcccaccaaagttctgccacaagcccccgccacgtgtcagatgaaggatgattggaaattacaacagccgttctggagggcaatttagccataactgttataataagcagacccttcaactcagcaattctgcatcaatgcatttttactagagaaatcctggcacatgtgctgaggagtaagcaagtacccccattgctgtgtcatctgcagaagtgaaagtctgggagcgatctcgaggtgtactcatcaggaggagaatgattaaataggtagtggaatagcatgcagcaactaaagagaatgaagttgacccccatgtattgtcatggaaaactaagattgttaagcgaaaaaagcaaatttgcagaagcatatgtgcactatgccatatgtagtggttttaaaatacatacagaagttcttcgatactctttcccttatgagatgcagcttaattcgcctccacttgagtttgggccagacttagtaattcatttctagtggacagaatatggcataaatgacaaggtgccacttccaagactaggtaataaaaaggtattgtggcttccttcttgatctctctctttcattcttttactctcccatcactcactctagaggatgccaactactgtgttttaaggacactccaggaaccctgtggagaagcccatgtggcagcctcctgtcaatagccagtgatggacagaagactccaggcaacagctgtgttggtgagccatgatggaagcacttcctccagtcccagtcaagcttccaaatgactgtagtcctggcttagaccctgactacaacttcaggagagatcatgaactagaaccccccagagcttagtgcccttggattgctcactctcagaaagtgtgagagatagtaaatatttgttatttcaagtcactgttcatggcagcaattgacaacaatacaccgtttatataaacataaatttttaaataacttaacaatacacacatggagacaaatgtttagagaaaggtttggcaggagatgtgccatagtgatgaaggggttacctctgagaagtggagaggagagggatggagggtggggataagattagcttcacctgttgtgtctctatttttgttatacatgcattcatacatgcattactgacataattttagaaagcactaaaagggaagaaatacaatgtaaaattctactactttggaatttcatggcaagtcagataaagctgaggtttacctttgatcaccttcaagtaaaagggttgcttagcaaactcatttaataataaacaaggttatcagcggagctctccaacctacttaagaaagccaactcctgtcagttactcttaaaaatcaccttagcataagtcatatataataaatgatcatttttactcatgtttcttatctattattaaagcaggtcaaagagacctttctttggacaacaccaattggcaatatttgtattcccaaagagcatccaaattattttgaaaatgacaaagataagctctactgaaaaagccaagttatatattaatgcactgtggtttcatcaaatggtttaaaatcaaagaggttttgttgtcaggtaaggttatggaaaaggtattttaaaagtaaactttgtattggatttcttttaggcttgtgctaatttgtttttcaacttcgagcctgggggtctgcatcatttaatagcagttccaaggcaaggaccctgatcctcgtctgtggctagactggctgcaggcaccaaagcttatgcattttcagtggaattgggtccagagcttagctgcaaaatgccttctgggtgactgaccagaaattcaatcacagcacattcatttcaaaaatccctttcatgtatcatttaaaagcagcctgcatacttacatttgcatatctctgaccctggattttggaaatgcaggagaagaatggattgctgtttaattttcaggatgatgggaaggaacaaaccagaggcatttccttctcttgactactgagtagatttagtacttctgaaagattctgaatcagtagttttgtaacataagccgctgttccatagagcttgggaataagaataactaacatttatagggcattttataccctacaaagtgggttaccattcattgcctcatttaatgggcagaggggctcttaattatcctttctgatgaggggacaatgattctttcaatcccagcatctgcagagattactctggttttcctttcatatggacacactaaagaaataatgatactgcatgctagcttcctcagcctgggaaagaatacactacggcagatgtgaggtttcttcattttccccatgctgcagtgtgtattccaagtttctttcgattaactgaaaagtatatgtgaatcttttctgcaggaagacaggaaagttaaaaggtagcctctgggatgcctgggtttgaatcctagctctgtcattttctggctgcaaagtcttaagcaaattatttttctgttagatatttaaaaccctttaacttatcagttttcttatctgaaaaatggggctgataataatagtaccagcatcacatggtttccatgagaattaaatgagtgaattcatgtcgtgtacttaaaagaatgcctgatgcatagtcaacattcagtgactgttgtttgtatgtgcagtgagctgcattttaggctggatgggtaacaaggcacatccaccattcattcaattactgcacagctctctgccaggcaggctgaagctccaaggatatgtcaaatgtggttcctctccttgcaacacttacattctggtggaggaggcagacaaattaagattaaggagggtagacaatggagagtggagctagagaatgaagctctgagtgagagtggggttttcttgtttttaggatgtgaaaggccagcctttcaaaacacatggggaagaacagtcctggtggagggaagatcaggagtgagggcttgaaggaggagagagcatggcaagtgtgaggaactgacaggcaatggaattgggggctgagtggagagggagggaggtaggcaggttgcccaggccatggtggaatgtgacagttttgtgctgtgtacaaagggaagccacagaaggtttagaagtagagcgggaacatggttttatataaatttatgacatttagtgaaaactttatataatggtatcacatataaatatctattgcatacacatatttaaagatagtactggctgccatgtagggtgaggattgtggaacggagggaccacagtaggaacacaaaaatagaagaaagagacacataccagcagagaactacaactgctttggagtttaaaggaaaatgggtggaaggcgagagatggaagccccatttgaggtgactttgaagaggacattgttttggacatgcaggggtgtctggaaaacatagatggcctcactagttgctatgtgtcttgcacagaggacataggggtcttccctggagtgtcccaaatttaatatatggatctctgaaatctgtacaaacatgcgatatgggggaaggaaagaatacaagaatattgcttgtatcccaaatcacactggtacttagactatcctgtggaaccaaactgcaagaaagttccagaaataaccagtgacttgatctgcatccaagtggaaccctttgccctgacatcaccttggcttttgaaggccaagaaaacctacagggtttaaacttccattttccacaaagctttgaggccaagcggaactcttccatgcaccttgaaggcttggtcgcctgaaatgaagctgagtagacataaggagatgtccaaaggaaaacaaccaaggaaggacatgaaacctctcagctactcagacctgtccagatatggagcttggcattgtgatgctattcctcagttgattttgctcacattatggttctgtttatgtgatattctttgtgacaggccaccccttcctctcaacattaacatcagtgatgtctgctttctctggagttactcatacaagcattctccttggcttagagatttacaaatgatagataaccaaaatttcaatgattgccccaaaggctcaatctgtagcagcaaaagcaacaggtgaactagcaccagaggagctaggtttcagtctcagctctaccatgaaacagctttgtgatctggggcaagaaccctcattctttgaatttctctttcctcttggctaaaagttaccaacattacctcaaaggcttgttatgaggattcattatgacatctgtccaagtattttattaaattaataaaatacaaatacggcactatcatgatgaaataacagcaaatgtttacatgacatttaaaaatatttaaatattttcacgagctatatttcattagccaattcactaatgaatgagttccccattaagttggctccatgagacgccacaaactttgtctgatttttccccatcctgaatccttagcatctaaagaagtaccagtacctagtaggagcttaatacctacgggtcaaatgaaagaaaggaagaatgaacagaaaccactctggggaatggaaggacactggtttgcagaagacagagaatatcttctgtaggtcataggaataatcctgagcaacagaaaaatttagttatcctacaaactaaaatttcacagctacatttatgatagcacaggccctaatcctgtctctacagacccctaggtttttttacttccaatccctgccctctcttacatggaattttttttttcccaaatggaattaaaacctaatactttcctaatgcagtctttcagttctcttcttaagccatctgctcttttatctacaaaaacttacttattttatttgaaaacttttaattagatgcttccaggcagtggctgagttaagtttagaagcttcaagcttgtctcatactcagcagctgcagtaaggaaataaggcttatgatttaaattcattattatctccatgttgatgtcatttttctcccttgctattgcattgttccaggaagttacataaggcttaagaaccaccagactaataatattgcttcttagaaatgacctttcagggaattttccttatgtgatcagatgctggtaaagctatgataataagtaatatacttcccctctacctcaccttttatctgaagattactgaaagctttgcaaacattaattaagccaacctcataacactcagggaaaaaggaattatccatcgcagaaaactaaaactgagtttaaaggcacattactgacatgtttagagtcagccaatcagcaacagaattctgattgttctgtccccaccttcacccccacctcccctgtgggcttaagaaactcttacttatcctccaagactctgctcaggcatcacctctagaaagctctccttgcctccaccttccaagttgaattaggtgcatcccttcctgttgcactctcaacatcctctgcaggtatcttcatctatacacaccctattcttcataataacatatattaatgaagtgtccatatgggtgggtctgactggcaaatccatttcttccctttttttttttttcatttgtgacggagggtataagaacaggaagtgctggtatcataattattttgaatctatattaatttatataaaagagcaaaacatttgtcaactccagtgctttagttgttgttagtagttattgtgatgtcttacagttatatgatgtgccaatagtgtattacaatatcatatttgtgccttcccatcctatgacacaactctgaagacagtgagagcatctgataatcttaaataacttttgggtaacaagaaaggtgtgtttgtttagaagctaaatctgcttcctatattatgtaaaaattaaatgataattgcatacaaagcatttagcacagcatgtaacacacagtaaacacgaataaattcagctgttgtgtaataacatcaataattactatttattgagtgcatattatgtgttaggaactatgccaagtgctttatatgtaccctcttaatattcctggcaaccctataaggtattgctttaatctctattttgcagatgaaggaactgaagtatatggaatttttataattttcactgcatagctagtaagtagaaaattaagcttgtctgcctccagagttcagcaaactatactgcctctatttaagcaaacaagcagcatttattaagtgtctttgtggccaccatgtgctattatgggatgaaatgaactctctgctctccagcaactcatactcttgctggaaaagacaggcaagatacccaagtggaagatgtgaggtgataagactgtatgtgatgaattatcaaactaaacaatttaaagcaaatatgctctagatttaaaggaggaagagactgaggagctgcaagtcagaagagacctcagaagttaaggtgcacctggaattattagtatggtctgcatgctctgctgtgattttgtgggtgagggatgcattggaaatacctggctgaggggaggggtgctttttcaaacttcactctcacccacccttgactcgcatagttgaaaaattgctgttgaagtttaccaggggtattgaagaaaatatttgagggttgtcccatcaaaaagtgggcaaaggatatgaacagacagttctcaaagaagacatttatgcagccaaaaaacacatgaaaaaatgctcatcatcactggccatcagagaaatgcaaatcaaaaccacaatgagataccatctcacaccagttagaatagcgatcattaaaaagtcaggaaacaacaggtgctggagaggttgtggagaaataggaacacttttgcactgttggtgggactgtaaactaggtcaaccattgtggaagtcagtgtggcgattcctcagggatctagaactagaaataccatttgacccagccatcccattactggatatatacccaaaggattataaatcatgctgctataaagacacatgcacatgtatgtttattgcggcactgctcacaacagcaaagacttggaaccaacccaaatgtccaacaacgatagactggattaagaaaatgtggcacatatacaccatggaatactatgcagccataaaaaatgatgagttcatgtcctttgtagggacatggatgaagctggaaaccatcattctcagcaaactatcacaaggacaaaaatccaaacaccacaagttttcactcataggtgggaattgaacaatgagaacacatggacacaggaaggggaacatcacacactggggactgttgtggggtgtgggaagtggggggtgcagcacaccaacatggcacatgtatacatatgtaacaaacctgcacgttgtgcacatgtaccctaaaacttaaagtatagtaataataaaatttaaaaaaaaaaaagaaaatatttgagggttgtaactgtctggattttgtagtcagattgcctgagctgaaattttggccatgtctcatttcttttttaacctcagttttctgatcaataagatggaaaataataattacagtatgaggagatgtttgtaaaacacctagcatggtgcctggtgtgtaacatgtttaatgtgtgataatttagtaatgtttccctggcttgatgagggataaaaaaagatgggactcactaatctaggatgtttgtcagatagcaaaccgcattgagctctctgcagagtgtatgtgggaatgatggcagagaagggctgtaggaggagctgacaagcactacatttccaatctgtcttgggacctaaaccttccagcctgaagacatcttagcatcttagcctgacagtatttcttaaacagctctgactccaaatggccactcaaacataatggaatgatatgatttcatacaacatgctcttgggactggtagaattcctttaatggacaaaatgttaaagaaaaaagttactgatattggctaaaacaaaagaacagtttactgcagaatatagaataatctttcatagattttaggaagcaacaataagcagttatgaacaacgtggactcaatgggaagactacacttgaattcactcacttcagcattctctgaaggcatcagtttccccatctattaaatggagaagaaaatagtaccgaaagctgcacagaaggcagttatgaggattaaatgagatagtgaatataaaacacataacacagttccaggcatacagtcagcactcagttctgttcactactctttctattcaaggtgctgtgctaagattttgggtaatagagatgaaaaatatctaagcattctcacaacagtttttagtagttatttcttacatatctacatactctttgggaacagatttctggtctaatccattctattcatctccatatatccagagtcaggcacagaacttgaagtacagtctgtgcttaacagttgtgacttgaataaataaatagggatgcacggcacccaaccatcatgcttaagaaactcataggaatgaagacaggcacctagacaagtaattataatgcagtgtaattgttgtggtcaagaggctgtggattcatagaaggcctgggcgactagcatcattgtcctggaagcaaaccagaccaagtccaggtctgccctgcttcaggctggtaggtaataaggaacatgtgtggaatatcaccaacatctgactacggtcactttgagttctctagttgagcctctgtcatttggctaatgtgccccgcacatcagtggagtgacctgtgacccgcctggctccaagagcagctctgtgagcctgttttgctagatttctgcctggagcacttggccataacaaagtggagaggagagaaatcaataacaacctgaactgaacgcacagttaaaacatcagccttcaactctggaatcacacccttgtcactggcatccaaagtgcttttgctccacgacctgctcagggtctagtaagcaaacatgaaggaggaaatggaaatagctccagggcacagacagggaaatgtgctatttgataaacgggaacccaccaagggacagcttcctagcgtataggatagaaataacgcagctggttcaaatgctggttgaggatcttccggtatgtttctcaacctctctgagcctctggtttcttgtttggaaaggatgatgatgatgataatcttacccaagagtggtatgactcttttggcaattcagtaagcattaatgcatgtgacatacccaacacacgaactgactcttggctggtgctcaataaatggtagcttattacaactgcttttctgctgctcataaggaggtaagcaagaccaaatgcagtgaaaataatttattagccacagaaataaaagctacagcaatttaggtttcccacagttctgttaaaagaatgcttaccaagcacctgtcatgtgccacctgctatgttaaggactgggacccaaaaatgagttaagacaaggacccttctttccaaaggtcttgctctgtctctcaggctggaatgcactggtgctatcatggctcactgcaactttgactttatggactcaagtgatcctactgtctcagcctcccaagtaggtgggactacaggcatgtgctaccatgcctggctaatttttatattttattttttgtagaggggggtctcactatattgcacaggctagtcttgaacttctgccctcaaactatcttcttgccttggcctcccaaagtgctgggattacaggtgtgagccactgatcctggcaacaattttaatataattattaaaaggaatttcacagaaaagagaaacgtacaggtggcagaacacacagagaggggcaaccagctcaacacagagaagatggaagctggtttgagtctgaaggacttcatggagccagccccatgacggaaagtggaaggggcactccagctgtgggctgtagggacctgagtctggaggggggtgggcaggcaccagatgacaaaagccttgtgggcccacttttgaaggaatttaccctgagaagccaggagccactgaagatttttaagtaggaacagatttacatttggatatatcactttggctttagggtggaatgaaagttattatttcgcaggagtatttagggcgctatttcttcattcctttccaactcaagcaaatacacaagtctattgcctcttctggatggctcaagtcagtaattatacaaccaaacataacttttggacccagaatcattcccctaatggataaaatgttttaagcaggcatctctcagctctcatgctccatttccccagagtccttatcccttgatcacatacttgtctacttctgctgcacctgcaagagtgagttcattactctccattatacatctccattcagtcataggcaacctcagtgggaatgtcacaggtcccaggccttttggtggctgctacagttaagataatttaagtccttctaatctcaagaggtgatcttgctagccaagagatgtctctttatggaacatctctatcccgagagagagagagagagagagagagagatacacgcacacacacacgcacacgcacacgtactctgccccatctaaaccatcctagtggatcttcctagttattgccaaaatattaagctacttgaatcatatgtcattgcagtacaattaagaatttaattatcctcaggtataaaaagagttaataaggccaataattaaactcttggtagaaaacacatagaggtttcagaagaataagtagattttgttaaaagtgtgtcatacatactattttatgacaaatgtatcttcttttttaagttccaaatcagtgaagatttcttatatgctatagaaaatgtgatatcaaattttaaaaggttgcttggaaacacagatgtaaataataactatatttcacattcatacattataagatgtagttttcatatgatatctgaatgctttcacatcccttagctagactgagcacaggaaatccacgtctaggcagtgtgtgttttcacaccttgtactagggtaattttcagagtcattaccattctggtaagaaagtttcataagggctttaacaacatatgagaaataaggaaaatctatctctttttccttattcctctgagcctcaaagttaagcctgcatttgaagaacagtgcccagaacatggaaggagcaacataaaccacatattatgagaagtggccaaaaccctttgtgttagcatctgacttattattggtaacatctaaattgccactctaaattataaatagttaaactgtgcgcaatgtgaaataatcaagaccatgctttgtttcttaacatctactacactggctcaaatacttttatccagattcttccaacatgacacacattacatttagaacttggttttctcatcagatttgtagagaagatagttaatgcatatttcacaccacaggaagtgattggggtaaacttaatatcataggagcttttggatttagacaaagaaacccattagttttctcaaacagccatcagagagactttaattaagtcaccctgacacacgtatgccttcactggatcacgatttctcatgctggtaactttcaagcccggaaaatagtcactttgggaaagtgtttagactggttgttttggacagaactttttagactctccatttattatcatctggtgattaaagaattaagatggtgatacctaaacatgttcttttaaaggaaaataagtatcattaaatcattaataattatttgaggaaaaaggagccaatggcatctcttgaaaagccctcattatactttctgtaatgtgctcctagcttaaatgcagaaagatgtctttgctaactttaacagctcatgaaaagttactgtaccacatacttagtagtctttgatgtattttgctgatgataaagaatcaaattccattcttcccacaaaaatttattccagtatttttaggtttaaaaaagatgtctgggaaaaaaaagagaaaatgtctctaaattagcatttgagatgaattaccattttccagagatatcactccctacaatattccaccccaaataaaccggaggaagaactgtggctaaatgcctaagccaggagtgagtggggagtgggaaaaggctccaggcaggtgaaaagaaccaagttaaagtctgaccaagactgaggtaaaaaacacataattccttctgataacacagcagccattattatagctagtgttgtgctcagtactttccctgagtaatttcactaatccttgtaagtacttcatgaggtgatttctattatttatactttcaaatgagaaaacaggctcagagaggttaagttctcaaagtctcacagacagcaagttcttgtcttagcttctggaacagtgaatgctaccacaacaccgtgggccctacggcaccataaaaaagcttggcagaaggtggggcacggtggctcatgtctgtaatcctagcactttgggaggccaaggcgggagaatcacttgaggtcaggagttcaagaccagcctggccaatatggtgaaaccccgtctctactaaaaatacaaaaattggccaggtgaggtggcgcatgcctgttgtcccagctacttgggaggctgaggcaggagaatcacttgaacctgggaggcagaggttgcagtgagccgagaccacaccattgcactccagcctgggcatagaagtgtctcaaaaaaaaaaaaaaaaaaaaaaaaaaaggctcagcagagacagtaacagcacagaatatcttaggtagcattagtttctccttgcatatatccagacttcactaaatgtttaggccaagaagaaaatcacaaaacaggaatacttgagaatatataaaagtggctcatatccttcaaaatttgaaccccgaggcccaccccttgtctcctgtttggggagtccaaagaattcacagacacatcagtcatttagtctgtaagcaaatttcatttaattcatactttgcctggggttagcagtccatggtcagaaatgctcctggtaccatattcctaagactgtcactgactctgcagctggttcttccgtggtatagagtgaatctttcagtaggaagtgtttctaacaagttcccatgctgctgaagccaacacaaggcaagaagctttgaaatggctgatgtttaaattatgactccaatacacacatacatacacacacacacacacacctatatatatatatttagtagacttttttagagcagttttaagttcacagaaaaattgagtacaagctatagagatttcccatacactccctgcttccacacatgcacagcctccccattatcaacaacctccaccacagtggttcatttgttgcaatcgatgaacctctgttgacacatcattatcacccaaagtccatagtttacattagggttcactcttcgcattgcacattccagggtttggacaaatgtagcatgacacgtatctaccactatagaatcatatacagtagttccaccaccctaaaaatgatctgtgcctaacctattcactcctccctctccccaaaccctggcaactgctgatcttttgactgtctctatagctttttccagagccatatattttttaaaacaattacctgaggtcctctggggaaaaatatcttattagagattcacaataagcattgtcatttgaaaggatctgaaaactctagcagttaacaattggttttcttttttttttttgaaacagggtcttactccgtcacccaggttggagtgcagtggcacactcacagctcactacagtctccacctcccaggctcaagcaatcctcccaccccagcctcccgagtagctgggactacaggtgcatgccaccatacccagctaatttttttattttttgtagagacagtgtttcgctatgttgcccaggctggtcttgaactcctgaactcaaacaatccatctgccctggactcccaaagtcccaaagagccaccatgcaagtcctaagaactggttgtaattttgttgtagccaatgcttcccaagaaattcctgggggtgaaatggttaacagttttattccctcctcttctcactatctccactgtcactccccagctcagaccaacctcatctctcactgtccactgtcatggcctccaaatctggtctctccattcacctcctgcttattttgcatcctttttcctcttaacacagagtgatctctttagaatataaactggctttccactgcattaaggtaaaatccaaacttcttcccatgatctataaggtcccataccatctgacgctgggcccacaccatctgacattgggcccacatctccaactttgactattattttcttcctcattaactgcaagtctcactggcctcctcccagctctttcctgttcctggagatttgctgtcgcatctgcctagtgtttctgagactttttacagctcttaatccttcaggtgtcagcttaactatcttatcgtcaggcaaagatttgttgttacttttttttttttttgagacagtctctcactctgcctctcactgaggctgaggctgaattgctcactttaacctctgcttctcaggttcaagtgattctcctgcctcagcctcccaagtaggtgggaaagcaggtatgtgccaccatgcctggctaatttttgtatttttagtagaggcagggttttgccatgttggccaggctggtcttgaactcctggcctcaagcaatctgcctgccacagcctcccaaagtgctgggattacaggccaggcaaagcttttgtaaccacctaaagcacagccttctcccttgcccttctcgatgttactccctatcacagtagttttcaaaatgtggtcctgaaaccaacagcatcaggaacatctgggaacttgttaggaatgcaagttctcaggccccaccctagacctgctgaatcagaaactctggggtgtggcaaatccatgtgtattagcgagcccttcaggtgattctgatacaggctaaagtttgcgcagttctatggcagtatcctgtttatttcctacatgtttatcgtaaactataatcgtttcttcttattatttaatgcatttagcttttctcactagatttgcaagcactgtaaggatcagcaatcattgttgaggtacaagacaatatctgaggctgattaatatttgctgaatgaatgaatgacacggaacatatcttggaaaatactgctttacataggatctatattagcttatggctaaacttcaattgccgtgaaccaccttaccaatatttctttccattcatttattcaacatttattgacatttgtaatatgctaggcactatcccaaatgctataaatacaaacacgagcaagtccttgttctgaaagaacttatagacaagtgagataaaaacaggtaaatacacaattattttattctgataagtgttattataaggcctagaaaaacctaccaaaagcattaaaaatacacatgtacttgtctttgacctagttattctagttctaaaaattaattctaaaaaaaacccagggatgcatacacagatttatcaaaacgatgtttgtcagcattatttatactagcaaaaaaaatcagaaataacctaaatgtaaaagaatggagaatttggctgggtgtagtggctcatgcctgtaatcctagcattttgggaggccgaggcaggcagatcacttgaggtcagcagttcgagaccagcctggccaacactgtgaaaccccgtctctactaaaaatacaaaaattagccagacttggtagtgcacacctgtaatcctagatactcgggagaggctgaggcaggagaatcatttgaaccaggcaggcggaggttgcagtaagccaagatcacaccactgcactccagagtgggtgacagagtgagattccgtctcaaaaaaaaaaaaaaaaaaaaaaaaagaatgaagaattcaaaaattatcctagacataggccagaacactaaaaaattattgcaattaaaaagaatccttaatgatgtgaaattgttcacaatatactactaagtaagaaactatataatatagtttttaattctatataaaaataaatgtattgggaaaatgtattaaaaatgttaacagaaattactaggtgttatgataacaggtaatttaacgtttctacttttatgcttctctttatttccaaatgttttgcaatgcactatgatactaagagaaaaatgttaagggcaacaagtcagagttgagggagcaagtaaatctgctatgtgggttgggaggtatcatcacacaggaggtgtcgtctgagttgggacttgagaatgcatgggagctgttatcaggaagagttgtcagtaaagcaggattcagggaagtgctgagtgcctttgggggccaagaaatagctcaatgaggctcaagcagttgcagaggggatttgcagctctccaccaaatttagtttacagagaacaacctatttactttctcaaaagaaaacaaagtttcatatggacagtgacattcttttttaataaaaatcagaatttacctatgcatgatgggccatccatgctctaccaggcgcattttgaaaagccacagacagctttcctgctgcataaagaataatacaaataaatagaaattataacgtttcactttggctgattatgagataacatcagatgggagaaggaggaggatatatctttatatcttagacccaaagctcccagtgccagaattctagaagcaggcctaatcccatggtctggctctcatcagtggccaagaagactgaatgagcagtgaaatacctctttgatgcttgttcatcactcagcaccagcacagaaatttcaaaggccatgttaagtgacttgacaatctggagacagatgataaagtctcagcttctgatcactaaacacaataaatcccttgcgaacaggtgctactaattttttttaaaaagatccatcttgtgctgtcagtcattttcagatcaactacaagtgagcctgttgacctgaggtatactcagattgggctaaaattcagtaaaatatgagttttgagaagggtacatgtgatttaaatagatgggattgccccagagatgccttccataagagttacaaactcaagtgtcaatagagcagtggcagatgatgagctgtctaccaatatcagtcctgcccttcttgaacaataagaaagttttagctgggcacatgattaggtagaacatttgctagcttctcttgctatgacagacatgtgagaaactctccaaacaatttttctatttttcttcggtatatagctaatctgtgtttcccaatcccctactgcagttaaaagagggcatgtgactaatttctagccaatgcaatgtgggtggggatgagatacccaatatcctggcccataaaaagtattccatgctcttttcacttgcaggagaagagaaaggaatccacaaacctagaggagatcagaatgtgtgtaccttcagagatacaaattctatttcaaaaaagccaccttactgaaacacttgcacatgtacacagagaatcattttcatgggtgttcgttgcagcattgcttatactagcagaaaattggaaacaacctgaattacatctacaggaaaatggtaaagcaaattctggaatatccatactaaaaaacataatgcaacctttaaaaaggttctatatgggctatcatggaaagatctccaagacctattgctgatcataaaagcaagctgcaggataatttatcccctaaaacagcaaacatttatagatgatttatatgtcaggtactgtttagggagtggggataaagtagtgaaccacagacaaaaatccttgcctatataaaacttatgagcacgtagaatgtatattttaacatcctaaaattatatattagttaataacttgtgcatatatatatatatatatatatatatatatatatatatatatatatatacttatttctaaatacagagagaagatccagaatgagacccaccaaattgttcatggtggtaatctctagagaggggagtggggtcaaagaggggataacaacttctttgtctatattcttctgtgtttccatgtttataggaatgcatttgtgaatttgaattctttttagtggaatgcattccactaatgcaaccaaaaaaactgctcttcaggggcctagccatggaactcctcaagggccaccaccatagaaggatgaacaatgtgtccattttcctcaactggtgtcttcatctgctttatttatttatgcccataagtgaggtttcttttgatcaaaggtttctgtggccacaaacgtttaagaacagccaacattgctcataatcagaaaattaaaatacacaaaggaatatggatagaaatctcacttgggcataacactagactaatcccatatcatttaagggttttgattgtctagctcttttgttactaaggctcctctgcctgtaaaggacaagacttaagcttttcagatgtcaaatagcactcaataaacatcacaaatgagttctgatgtggaaaatgcattctcaaatagaagagtttttgttttattttaaaattgtgttagcacctaaaagacccctgtaatagtgaagataaagttaatccagtaatgcatttaccatagtaaacctccagaacagaaacacattacttccctctgatggaattttaaatcagcgtaagggattaaacagtattatccagctgatggagagcaacttggaaattatgggaaatggccatactgcacagccgtttgcattccaggaattccgtttggaccttccatgattaatatgtctgatataattctggggagctggtgtcttttctcctttgactttttcatttcatcttttcaaaaggcttgcacaaagcagagccaggcttcatgctcttctttcagactgtggtttattatgatctagatttgaattaaagcagtggaaatggcctcacaattctacaactccacttttagtatttggttgaaacagaatgcattctccattgtattagcacatgcacaaaataatgaattatggcctatctacaaaaataaacattgtctgacagattatagggtgagtggattggatgatacagagcctgaaggtaatcaaagttcattccttcttttgccaccttccctttcagcttgctttcctgagcagcagggtttgagaattctctttttttctgcatgtttaaattaaggcacaactcaacagctatttcagataaaatagtctcccaatttatccatcttttcctgaaatatttttaccgtagaggccaattttaattgccatgagttttttgtttaatgtgaattatttatataattaatctgtttttcttagcacttattgacagcctaccttcacagaccatctcttctcccaaatacctcatccttgtttctcctatctgtaaacattcccactgcaacccgtcgtaataggtaatgtcagccacagaaggaaataaaatatcttagtatccataagcaaaacaagagagaaaactgtatattttgtaggcttggtgaattctgtggacttataagccttggactaatcctaatcaaaattaaatctttctttgattttcctggatactctaacttgatgaatgacttaactgctttgtgttttagttttctgaaaattgataggataagatgataatacctaactcatggggttaagagttgagtgagatgatataggaagctatttcacatataatgcctggcatgtggaaagcatttagtaaatgggagctgttattgctgtcattattatcatcactatcagcaatgtgtttttgtcttaaactgaccaaaaaataataaagtctgagaaccaggaccaaatgtcagaaaggttcttggatccagattttagtaaaaatcaaggaaaacctctctaatgatgagagagacaaaaataaagtggggggttgtatactaacattattactgagtttacagaaaaaaaaaatggatgtaagagaatattataaggctgggtgtggtgactcatgcctataatcccagcactttgggaggccaaggtgggcggatcacctgaggtctggagttcgagaccagcctggccaacacggcaaaaccccgtctctactaaaagtacaaaaattagctgggcgtggtggtgcatgccagtagccccagctacttgggaggctgaggcaggataatcgcttgagcctgggagatagaggctgcagtgagctgagatcatgccactgcactccagcctgggagatagagcaagactctgtctcaaaaaaaaaaaaaaaagaaaagagagagaatattatgaataactgtatgccaacaaattgggtaacctagattaactggacaaattcctagaaacacagacattaccaaaactgacttaaggagaaatagaaaatccaagtagacctgtatcaagcaaggaaatgaaatcagtaattagaaatcttccagagaaaagcccaagactagatgtcttcacaggtgaattctaaacatttaaagaagaattaacaccaatccttctcaaactctttcaaaaaaacgaaaacaaaaacacagaaacaaaaacactttcttaattactttatgagaccagcattactttgatactaaagtcagacagacaacacaagcaaagaaaactataaactaacacattttatgaataccgatgtaaaaattctcaacaaaatactaggaaaccaagctcaacagcatattgaaaggattatacaccctgagcaagtgaaatttatcccaggattgcaaaagtggtaaaatgtatgaaaatcaatgagtgtaatataccacattaatagaataaaggaaaaaactatgtgattgtctcaattgacaaagaaaaagcatttgacaaaatctaacaaatatcctttcatgataaaaccctcaatacattagaaatagaagggaacatcctcaatttgataaaagccatgtagcccctaagattaggaacaagacaaagatgtctgcttttatcacttatattcaacaaagatgcctgcttttatcacttatattcaacataatactgaaagacctagccagagcaattaggcaggaaaaataaataaaaggcacctaaattagaaaggaagaagtaaaactatcttcgcctgcagatgatatgatcttacatttaaaaaccttaagaacacaaacacacacacgcaaatctgtcatagctaataaaatgaattcagcaaagttgcagaatacaaatcaacaacaaaagaagttgtatttttatgaactggcaatgaacactctgagaaggaagtttataaaaacgctgtttacaatagcataaaaaataataaaatgcttaggaataaatttaactaaggaggtacaagacttgtacactgaaaactacaaaacattgcttaaagaaatgcaagacaaaaataaatggaaacacattcagtgttcatggatgggaagacttaatactgttaagatgataatgctgccccaatgtggtatatctgttcaaagtgacacacagattcaatgcgatccctatcaaaatcctaatggtgtttcttgaagaaatgtgaaaactgattctaaaattcatatggaatttcagaggaccaagaatacaagaatagtcaattcatcttgaaaaagaataaagttggagaactcacatttcctaatttcaaaacttacttactgcaaagctatattaatcaaaatgatgtggtacagggataacaacggttttatataacaatatagaattgagagcccagaaataaaccatcatctctatggtcaaatgattttctacaagggtgtcaagaccattcattgaggaaagaatactctcctcaacaaatggtgctaggaaaaaaccagacatccacattcaaaagaatgaagttgggccctacccaaatatgaacaagaaattaactcaaaataaactacaaacttcaatttaagagctgaaactataaaactgttgcaagaaaatataatggcaaatgtgtattatgtcagacttggcaatagttttaatatgacaccaaaagcacaggtaacaataacaaaaatatataaaattggacttcaccgaaataaaaatttctgtatatcaaaagacactatcaagagagtgaaaatacaacccacagaataggaaaaaaatttgcaaatcatacatttggtaaggttttaatatccagagtaaaaaaataactcttataactcagcaacaaaaagacaaacaacccaaataaaaaatgggcaaaggaattgaatacatgttttcttataaaagatatacaaatggccaatatgtacatgaaaagatgctcaacattattaattattaggaaaatgcaaaaaataccacactaagatactacttcacatctactaagatggctataatttttaaaaaggaaaataagtattgtcaaggatgtggaaaaattggaatccccacacattgctggaggaatgtaaaataatgcagcttccatcctcaaaaagttatacacagagttaggatatggcccagcaattccactcctaggcatgcaccccaaataattgaaaacagtgactcaaatagatacttatataccaatgttcatgcagcattattcacaataaccaaaaggtagaaacacctaagtgctcatcaacagaagaacgaataaataaaatgtggcgcatatgtaaatgaaatattatccagccataaaaaggaatgaagttctaatacatggtaaacatggatgaacctcaaaaacattctaagtgaatgaagttacacacaaaaagacaattattgtatgattctacttgaatgaaatatctagaataggcaaactcatagagatagaatatatagtagaggttaccagagactacggaaagggagaaatgagaagttatcacttaatgggtgcagtttctgtttggggtaatgagtatttttggaaataatagtgataattgcacaacactgtgaatgtaattaacgccactaaatatgcacttaaaagtggttaaaatggtaaattttatgttatatatattttaccacagtaaaaaggtaaattaagaagtctattataaacatcattgttggtatttgtaatggcaccatactatgacatatacaaaaccattcagtttttctatgcacaattgagaaaaggaaaagtggcccttataaactggaacttaaacatatttttggccagatagctggaacaggcaaaatgtaattggttaaattgtttgtatcagttctacctaaacatattaatccatgtctataaatgtttaaaaagatgaatgcactgttacgagggagtaaaattcccagcactgaagatactaataaaaaattgtatggtagcccagcagggaaattgtagaaggaatttatacacatggcaggatgttagacaagatgagggtctcaaaggccttccactttttaagagtttaaagttctatgagaattgtgtacaactagaaactttcccaaggttaaataattttcctttttccagaggcaatggaaaatggcaatttgggttccggcattcctgataaaaatttactgtttttgtctggtgatgtctctactgaaaatattctttgctataaatctcttgcctgaaatttccatagagcttatcaggtttcataaagcagatcaccttaaaatggcttttaaaaattcagagtggaacagattcctctatgaaattgtaatatggaaaataaagttctcctaaccctaattgtcttcacaaaagtgtttccaaggagaacacccagggatatgacataagtagcaaggccataataaagatgtgagtgtaatttccacacatgctgtcaacctcaaatatgcagcctactcagaggcaatttgggtaaaaattgtcatagctattgccagtgttgtcacttcttgattttttcatcctagggactgtgtcttattcattcttggtctcactgatggtgccacagtaccatctttcaggcattcagtcaaagtctcctgagttgaattttcactcttcctagatttcctttgttatcatgagtttttgataacaaaggggattgtgaagagaggagatgggtcagtgactcaaatttataaagcaggggtaaatgacacagtcatcagaatacataactgggccacagaaggcacatttaagtaacaatttggaaaactcagaatctaatcaacacatctgtgctttatattctctacctgctgtcttgcctaaaatgaagatgcttaaatccccattagtggggcagggctgcccatctatggaaaaacagagccggactccaatctgctttgtgtgtcttcagaacagctgccagctgatcagaaaacatttaatgtgggggatccagtgtggggcaggacgaacacagctggttgacacagcaagcagttagaaacaacaacaacaaaaatgccatttgattcgtgggctgagccaatccatctgggaaatctctcaaagaaagtagctggaaatgacatttcagctctgattttcctagtcaagtctgcaccttaagccaaagactcaaaaatagcactccatctagatggtgtaaatacagtgacacttgagtctcttcactttggtcttttaagagtgattttaactctttcagagataacatgggagactgaaggggctggatgctggaaacgagactgtccacatcttgtttccagaaaacggattactctgctggcggttgattcttggatttcctatcataagatctgaaccctgggcctgatgtacagtgaggcgtgcgattggcatttgcagaagccttgacatcccacactgcagttcatgattggtgtcagacaaagaagcatattaaatgactgccggcccggtgataaggccggttattaccgaggtgtagtttccccaggtctaaagactcatagtggtaccactgaagcatgctggggagaagataaaatttaattaataatttccttagaggccaacagtctattacaactatgttccttgctgttctctgcaatgaccttatagctcataaacattatagatgcatgcttggtcatagtctcatccccgggtttaatttatggctcaggttgcactgtataattagctagtctgaaatgaaggttttcagatgctgaaaacatttaaaatagactctgcataaggtagggtgtgcctccctcccttctgttcagtttaatgcctgtaatacatagtataatttcctggattaataatacacatatgatgaagctggggatgaaggtgaagtctgcttttgagttacatataggggacgaattttggtttatgttagatttggagattctggacactaaattaggtagctttttctgtattccatagagtagctcaaactaagtgtttttagaaacacaaaattgcaaaacaatgatgtaacgtggggttaaatttttctccactacagtaaaacacttgtctctttgtatgtgactacaatttattttggacctattatgtggccaacactttgtagagctgtggtagaaacaaacaaacaaaaagcctcaattatctctgggattagtgcctcaaaatcagagaagtagtacatgtttaataaatatctgttgactgcatgagtcaatgaattgattgtgggatattttatacattaaattattttttaaaatgggcaatgtttatatggtcagaaaagtaataataaagtagattaaaaatgatagttgctatcttcctaaaattgagaaccaatgtttgctgaatgcctccatccaggccctgcggtacgaggaatacagagaatacagcagtgaatactgattcagactttaaaggctgactgtccgatagcaaaaatgactccctcaacttgccagagtcaagcccaaactctaagtattacattttctacaattatctttggcatattcccctttccagcctatgctatatccaaattagatggcctttgttctagtgcctggctagaatagagtctgaaatacctgttgaatatataacataaaaagaaaactaatcactaggaatccctgtgctgtttgctgttggtgacccctctagttagatattcttcctcagttgctagtccatgagtccatgacaattctctctgcctgttcttcaagatctacttcaaacaccatctagaatatagaagtgcattgttggtatttgtgtcatttgatcactcagtcactcatttgtatatatctcacacctctttctaaaatggctaaggcatcacatgatagaactgcatagaagtagaagaatatctatgctttgtaaagatacagttttcagtgccaaagcaagccactttattccaattctcatccacatttcagatgatgatgatgatattagttaatacagttaacactattgacagagcatttattatttgctctggactatgttaacttcttcctatataattatttcacttacatacataatgccaccatgatatatatatatatatatatatatatatatatatatatatatataaaattattctcatgatataagtgaagaaactaaaacagacacactaagtaaacctgccccaaatcacatcataacagtagtgtgagtatatcaacccaggtctaagtctaaatctttgctcttagccactacattatcctgcctctctcataattctcagctaatgacaaacagatgtgaaagtgtgtatattgaactgtatccttgaagaaggcaacttgaatattccatttgcctgtctgatgccaactacccaaatttgtgtagtcactcgaccacctggatatttagtttacgttaacacaaaaatctggatatttgaaaaactgtggtgctcaagcaagcatttcaaatctcatctaaattcctagcttcatataatactcaggcaaggcatttttcatgaaaacagaacataagagatctgagccaagaaaaaaaaaaaagagacaaaattttagacaaaaagtatgtattgcttaatcaataccagttaaaaaaatgaattttcctgtagcccaccaccacatttcacagaatcatagttgtcccaatgtgatactttatgaaaacagtatatttcaggatattacaaccagactaaatccaactgaaagtcaaataaaggaagaaagacgctaggaatgaaataaattttggatcaatccagattcatcaccaactgatatgattgggatctgtgtcaccaccaaatctcatgttgaattgcaatccgtaaagttggaggtggggcctggtgagaggtgataggatcatgggggcagtttctgttgaatggtttaacaccatttcccttggtactgttgtcacgataataagctcttttgagatctggttgtttgaaagtgtgtagcacctcccccacccatgctccagcgatttgaatactggctccccctttgccctccaccatgactgcaagtttcctgaggcctccccaggagctgaggagatgctagcatcacgcttcctgtacaggctgcagaactgtgagccagttaaacctcatttgtttataaattacccagtctcaggtatttatttatagcaatgcaggaacgatctattacattatccattgtcataattgaaccagaactctcctatagctattgaggatcttaacatgttgtttcaaataaaaataaagacaccattctgaaccaactttacatttagaatatgccagtttctatattaatccaggaaactcagcatctaagtttcccctaaagcatctgttcctggggtgtacccacaaatttataaagttataaagcccaaagagatggcccacatgaattcacttcagcctgagtgatgactacctgattcctccagttattagcaaatttttctgtttgctctctcttgatttttaattcttgcacaagtcacatcatacattgcaaaagatataatattcttcaaacctaatacctcagtactcaatagttgtttttttccttgcccatttttttttaaagagttgatccatagtttttcaagctatgcttcatgtatggtgaccaccttggtttctgtacttttcttggttatttcaatatgtaaaatgcttgaacttaattgaagggtgagagagagaagggagaggaaacagaagaaagaaggaaaaagaaagaagagaggagagacagagagaaacagagggggaaggaagggaggcagaaaaggagagagagaaagaaaggggaatgtggctagaaatgtggatacaaaagtgtcatagaatcgatatggaaaaaaaatcctttaacctgctatcacatatactggctcaaattctgcttttagtgaatttcccccaaatatgaaaaagtaagtaggtataggaagagtttttaagaatattgaaaaactaaaaaccataaaatgtctgagaataaaggataggttaaacaaattaagattaatgtcatgggctttataaactactgaaaatcacatgatataagagtatttgatgacatatttgtgatctattcctaatacagaagcatgcatggtcatagtctcatccccaggtttaatttatggcccaggttacactgcataatcagctggactaaaatgaagattttcagatgctgtgaacattacaaattctgcataagttacagtgtggtatagcataagccctgatttcatttaaaagatatatgcattgaataaagagataataatttccacaaaaatgctcataaaacctacctttgggtgctttaagcatctgtctggacccgtcattttctctttagttgattaaatagcataagcaatttaaaatttttctacttatgctttttccattttccaaagtccatacaacttttataatcagttaaacatcatgctattttaaaaaataattaatgtcagaggctgtaaatttttttaagacactcctctaacacaaagcacccaaaaggaacttcttggaggtggatgcttgtctttgcaatggtcaacagatacaagattgcagacaacgcatttgtaagtctctggcagatgttatgagaatttcccatgaaccagaaatgaagcctctgaggaacaaggacctgaatcactaaatatcaattccatcccagagcactgcagaaattttgctactgtctgatcgggggataggaagagcaagaaggctgtgcttctgcctcggagaatgatgttattaacttatcacattagaatatcaaggaagatcagagtatgtatatatctttgtgtgtgtacctgtctatatgagcttagcacgtaattcccagacctacaaaacttggcacacaaaggaagcagaagcaccgaaatagtgaaggattgactggagtaccccaaaatcttatgcaataaaaagaacctcagctggttaacattttaccctttctctctttaattgtgaataataacattgaatgtttcagcctatttttccccaaaatggtctccaacttctagttttttctgtaaatagcatgcatgatatgcagaagttttctcaataaacagctatagaaacaaaacaaaacaaaaatttagtcacaactaaaagtgtgagaagaggacagcctcagtcctctaaatgactggattggattcttacatatttaaaaaataaatgtagccattattttaaagtcaaggatgtttccatattacctacaaaatagatgtgatgaagaaatatattggcacttataacactgatgggaaaattgattcaacacaacattccttgggattattagatatttttaccccactacaatcttatttatcctattcacaccttcagtaaatatcataccttctcgtaatagtaaatcagaatgaatatcaattagaactggaattctaaatatatacaatctgtaatgtatataatatatacagtctgtaggttgctcttaaatatactattaaaagtgctagttcaagttggtaaacatatcaatacaatttctttttgtgtggctctcagctcttcagaaggatgactgccgtgttgattttaaaacattgtccatttttctagttaaataaatatttccacatcagaaaagaaggttctattatgttaactttacagaatatcagtttcctggtgagttcagaatcagacatacttgacttgtcagaatcatgaaattgtaggattagacatacgtaagttagataccaatttacaaaggaataaaatagatggagtatcaacttttggaatatatgattgcgaagaaaaaagcaaacagaaaataagagtcacccaagagtgcatcacacccatggagaataaagtacaatcgtagcactccattttacttagcaataaataaaaagtaaattgtttaaatattatttattgcttttcaactttatgagataactcattgaataaaccctcaaccttaatagtggttacaaaagagaatataaacacaatcaaccctgatgatataaaaggagaagagtatagaaaaggaggaaggaagtgggagctaactttctcatctgacacagtgggaagtcaagataaaatagctggccaggcaccgtgtctcatgcctgtaacccaagcactctaggaggccgaggcaggcagattgcttgagcccaggagctcaagaccagcttgggcaacatagtgaaacgctgtctctacaaaaaaatacaaaaattagctgggcatggtagtgcacacctgtaatccctggtacttgggaggctgaggtaggaggatcacttgagaccaggaggtggaggctacagtgagctttgattgtaccactgcactccagcctgggcaacagagtgagaccctgtctcaaaaacaaacaaacaaaaaacaaaaacaacttaatagcttaagttggtgaaacaagaaatagaagtttcatggtgacatttaaacttacaaaggcaagcaacggaactaaaataataactagcaaaaatcagaatggagtaatttttaaaaagtcagataagttttggaagtaaatccttatttttcacagttgaggagttaatagaaatatattaaatgtatatatcaagaaatagtgatatatgcatgttctcactgatacatgggagctaaaaaagttgatctcatggaggtagatagtagagtggcagttgccagtggttgggaagggcataggggaggggagaataaagagaagtagattaatgagtacaaaaatatagtcagatagaagaaataagttctagtgttcgatagcacagtagggtgactacagttatcaataatttgttatatatttaaaaatagctaagagagaagatttggtatcttctcaacatgaaggaataataaaatctttgaggtgatggatatcccaagttaccctgatatgacgattacacattgtatgcatgtatcaaaatatcacatgtaccccataaatatgaacaattactatatatcaataaaactataataaatggaaggaaaaaaagaatcactcaagatatgtagaatactattgagaaggactcatttcaaaggtcatttctgagctttaggataactctagacactgtcccccaccccacttttctgtgatacacacatcaggaaacactactttaaatgcattatcatggttcacccaggttgccaagtgaagcgctcctggagacagtcagccaggtgccaattatgaagttggcaccttcctgattatcccacatcctgataaggaagacagatgctgccacttcctgaaacccctggctgtacccacctgggcctcctgacaaccaccaactatcactgaagtgctgttcatgggggccaggttacttccagacaatttaagatatttacattgccctctgctttctccgagctcttaatttataactcctttctgtttgtgtataaacccttttagtcctttgcccatattaatccttcttggtatcatttggaaagagatgatattggtttgattctctctggctctccccacctcccaaactggtagggaaaaaaatgaagacacatttgggtatgatgtaatctagcaagttcctttttattacagatcaatctttagagaaagatgaagttgcctgaaagcaataaaaaggtgaggcctgtaaaattttctttaattcaatcatctcaggaagcttttctttataacgaagctaacaacaactcttgttatctatgcttataataattccagtcaaatgcataaggctttagggtttatcttgttcatttttcataataaatccctattttacagataaaaaactgaagcatagagaggttaaggattttcctatggccatgtggatctttagtagcagatgtgggattttaactttagatttgtcaaaaatcaaacacacacacaaaaatagtgcttacaactgccctattattttccttgccatggcctttgttgagggttgcaaactcagatgccaggcagataatctccatgaggggagcaggctggaagggaaatatggcaacctggaatactcctacatgatctacagggtgatcactattggccaactccagctaactgtggtcatgaaggttgtatgtacacactgtggccacaggatcagatttgtcaagggaagatagacgcatagatttttttaacatttaaaaattgtatgtttttcaaatgttggcagctcatttaaaatattttaactggctgaacaaaagccttctgtagggagagttcagatcttgggccaccagagctcttccttcctttcctctcttttctcttctctcctctcctctcttttctcctcccctctcgcctctcccctctcccttctctcttgtcttctctttcttcttgagatggagtctcactgtgtcacccaggctggagtgcaatggggtgatctcagctcactgcaaccttcacctcccagattgaagtgattatcttgcctcagcctcctgagtacctgggactacaggcgcacaccactatgcctggctaagttttgtatttttagtaaagatggggtttcaccatgttggtcaggctagtctcgaactcctgacctcaggtgatccacccacctcggactcccaaagtgctgggattacaggcgtgagccaccatgtccagcctattctttctttctttaggctcaaatcttaacaggtgtgataataacatgctgcttcaatgaaacactgcatctttggcttttaaatttctctgtctctctactatagttaaggagttgagtgacaaactgtctttctcatgtctgctttcggaggcaaagtcaaaactgagcaggcttggtggaagcctgattttccagctggaaatgagaatccctccctctgcctcctccatgccgttgtgtgagcatttgcgcaagttgcctccagttttctcatgtggttcggatatatagtgtcttctactgagtctagctatattttgtcttggaggaggaagaaaaataaatccatattagactccaaaaaatatagcttggcttcaatctcctctgcccaaattttggggataatggtaaattccacactcaccagccacattttttttttctttagcacaccctggtttaaagaaaaaaaaaaagggaacagtaacctccaaagtagggaggtttaggttggacagagcaacctacaatcttaacattaagtaatttggaaaattactttaaaaatctacggtggggctgggcacagtggctcacgcctcccagcacgtttgggaggccgaggtgggcagaccacctgaggccaggagttcaagaccagcccagccaacaagacgaaaccccgtcgctactgaaaatacaaatattagccaggcgtggtggcacatgcctgtaatcccagctacttgggaggctgaggcaagagaatcccttgaacccaggaggcagatgttgcagtggtccgagatcgtgcatcattgcatttcagcctgggtgacagagaaaggctctatctcaacaacacaacaacaaaaattatggtgaagggtactctttaaatataatcctttgggttacacttaaacactctgcaacaacagaaacaaaactctctgccttggggttttgactcacacagacctctaaattcattcatccctctcagtttcttccagagaccttagcatcagcaaatcaatcttgctcactgttgtaccccagcacctggcacaaacattggtaaatatttgttgaataaatgaataaaatgaaaaaagggctcagatcagttgggaccaagataacatctatgcagtgatttattcattcaaatatgttggaatgaactcaggtccctaaggagcgtgctccaggaacaaaaggtggccactgttgagatcactgtgaggcttttgttttgctctgtagggtggaatccgagggcaacagctgattgtgtcttgacaaaagagtaggaaggaggatttctgagtgaatatgtgggtggaaaggcaagagaaaatagccaaaaacttggggggcaaatgggtaagacttggaaaagaaaaaagatgttgggtatgtgacataaccctttcagtctctccataaaactttcagtaacatgttcactatcatcaatgattttagaatcgagtaacatggtcagtattaataatatagctatcacacatgcttaacatagagaagcaaatataaatacaaaaatacaacaaaatctctggagcagtctcaggtgaaacagccaaagaaataaaaccttatacttcaacatgaaaatcactcaaaggtacttggaaaacactgttgatttacgcaaagacatttactgagcatttactatgggcctggtgatgttatggcaaacgagacagtcacgggcatggtccctgccctcaaggagagagaggcaatacatctaagaaataggactgtatcagtgatgggggctctgaagggaataaagaggaggtggtataagataatgataatggattggatttaatattaaataggtggtcagggctgacctctctgaggagtgacaactgagcctaaatgtgaaggataaaaagaggccagacataagaatgtctgtggataaacctttccaagaagaaaaaagagagatgtgcaaatggccggatgtagcagatggtcaggcaggcaggggccagatcagggagacagagaacataactaggtctgcaaggataatgggtagaggggcaaagtctcagggaagttgactgaaatgcagaggtaaaatgtaatcacaacacaagggccttgacatgccccatctctgggggaaatgttctcaaacactagccctccagggggcaggaaataatgtagtctagttaattgcccttcgggactgctctgtgtatgaatgtaaaactagggattatccagccccagatgcaaatgaaaagggcacagtgggtcactggttttcctgaagactcttctcacttgagatagaagtgaaaatgccaattaccctcatttctgtggaagggaactgggagaggagaaacaccagagaattgtgcttccgattggcttgaaaatcataacaaccaccccaaaattaagagaacaggaaaaaagccctttgctcttgggaccttaagtgattagaaagagttgttatttggctgattttcacacttcattagcatatgcatgatttaatgagggaacatgctggggggttggcacgggtgagggcagctctttctacccacagactagaaactggggcagtagcattgggagcgcttaattacgccagcaaggcaacagagatcagtgcacaaagggggatgagcatatgatggggacttggaacaagtacagaaagataccccaatgtctgtcttcacctctgagcacacctgcactgagccataaggcagcattgcctaatatccctcccaaggataaatccacctgtgataaacctcacactctccttctcttgcctcagacacctagattttcttctctgaaaatcctacaatggcaggaagagtgaagcattatattatgattgtccacattccatttagcattgaagagaggaggaagaaagtgggacagtgttttggggacagaataaaatgaactcttgaggaacagtcagaccttcacattttgattctgaactatactagagtagatacacaagtggagcagaaaggacaaaagtcacaacgaatgctgcaaatcggtcaatgtttaggctttctttttctccattcaaaacaccccaaaggaagatgaaaaagaagaaaaggcaaagagagactacctgcaaaggaaggactcaactatgcccagtcacctatcttttaggacctgtttctcttcttgtgtcctttggaaggacatatatataacacaaaaagtaaggagtagaatggtgcgggtctttttgaaaagtggcagggaattttacaactgtcacaccatatcttacattagcaccacgttcaatgtcatgtaactatcatactgctatatcttagtccattggtctattctgagatattttgccaatctttttctgcttcttataactcttcagtgtcgatcccccctttttctattaagaaaatattatttttcatttttcagcccaatctgctgtgtgtatgtgtgtgtggtgtgtgcacgtgtgcgtgtgcgtctgtacagcttacaggtctgagctaatcggcatattccctgcccctggcaacagtgattggttcaggcattaaaaaaaaatccaacttggaccaatgagagttaggtccagattttcactgctacattgagaagattccaacatattacttttactctcttcacactcactcctcaaagctctccaaacatgtcaaacattttcatacctctgtgcttttgcagatgctattccacttcttgaatgaatgaagaaatccatcagttcttccatatgttattttggcttgaatccccaaaccttatgctaccatatttaatttaataagcacacactcactactatttattataccagaccactggctgtctcccagcaacccattcttttcttcttctgccaataatcccctgactttcccttttcttatcctcaagtaaaatttgagaggtgctgattcctcccgccacatgagagtgaggccctaattggcctaattcatcaggtattccatcttactgaatatagggaatagatttagggataagcacagaatccaaacagagctaatgagatgttaggagatgtttcctaaggatttaaggagatgtggaaccctgcactatggcagacaattttctaccacaaagaggctggaacagctgctgggtctacatagaaagcagaggacagagactattgaacccgggtaacatagctaggctctagatcaagccttactcaaaactagtgttctttagatcttttaaggtgtgtgtgcctaatttttgattaagcaaacttttagtaggattttttagcctgtttaaccaaaaaattactggccaatacagtgacaaaatgttaaatagttcaagagcccagccaaaaacctgtgggaaattataaactatcttctgagtcaatgccacattgttcatgcattcatccattcaacatgtagttgaccaccacttactatatgccaagtactgtcctaggatgttgggggtataacaatgaacaaaacaaacaagtgtccttttggaacacagattctggtggagggagatatgtaacaaacaataaataagtaaggtatgtagtatgttagaaggtgactatgggaaagcagaataggttaatgcagatcagaaagactaaaggtgcaaggggacttcaatttcaaataggtactcaagaaaggcttcattgaaaaggcaacacttaaagccttgaagaagtaaggaaattggctatgcagatgtctggaagaagagcagcccaggtagaagaaactgccaatgttaaggccttccagactggggagttcaagcagcagcaagaaggctacgggacaggcagaaagcagtaggaagtgaggttagagaataaaccgaaggacagatgatgtagggtcttgcaggccatcataagggcccttttttacactgggtgaggtggggagtcattgaaagattttgaacagaagagtgacatgatctgacctaattttttataggaatcaatatggctactgtgtggagaagagatttgggggtcagtggtaaaagtggaagcagggaactgctacaacaaagtatgttagatacttgcttgcatcagcacggtagcagtggaagtgatgaaaaaagattagattctgggtagattttaaaaatagagccaatatgattttctgatgcattgcatgtggagtgtgaataaagaatgactgcaaggtttttggcctgaagaactagaaggatgaagttgttatcaactgaggaagggacagttgtaggtgaaaaaggtttgttcaggagatgatcagaagttcagtcggaaatattaagtctgcgatattttattagacatccaaatagaaattttgaagcagcagttgcataagaaaatatggaattcaggactggactaaaaacatgaatttgggagttgctgacatatagatactatttcaagtcacaagagtagatgaaataataaagggagaattgtacataacagtggatccaagtactaattcatttaagtcacttatttaatccctataaccttgttaagtcagttatttttatcctaattttataattaaggaaatcgaggctcatggatattaagatcacacaacagcttggccaagagcatatatgctcacctgtgtataaagacataaatagctgagctgggactgaaacccaggcagtctgactctagagtctgtgttcctgtcacccaatattgctgcctattcccaagtggaatttttaaatcagctgatacatgtttagggttagaaataacgagaatataaaggacctaagtgtgggcaacagagccaaaagaattcagttccctgtctctagggttatactgagctgcaactacaatgctgagacaaaggtaagggctgaggtatctaaacacagggagaccagtttgctcagtggtccccacacttagtcaaattcactagatgcagctttctaggtgaccatgcctagacattgattcagtagatattgagtagagctcagaaatttcattttgacacatatctcaggaaattctgaacactttttgagaaatgctattatagaaaatagacttagtttgactctgtccaataactctccattcccaaagaccaataaaactggcctttatcttaacttcacaagtaggattgtgactgaagaaagatatctgtacatggctaatgactacagcttagcttgaaaaaatagtttgatactctttatgaaggtcttcagtcttcttttgtcaatcataatcaatttcctacttgaactgaaattgatcttttatttagtcatgttagtaaataaaataaccttgaactttgcagagcaaatggtaggtttgcactaattactcattaaaagtgtgtgagaaatttacatctttcatttgtcagtggagacccaagcttattcagataactttacctaatgatagttgcaatcaaagtgtaatagcttttaacttatgctaacaagtgactgtacttacaataaactgccacagcagagctataaataaaatgggttgctatgaatgcccacttcctttttagttctgactaaatagacaagtacagagcttctcagaaatgcgcatataactccaataattctacagttgagtaagcccagaaaaacatggaaaaaagagctgatatttgcttgaatcaaaggtaactgcacaaatgatttccttcaataccaaatgccattaccaactgtttgcacatcctattgctttatgtttttacttagggttttgaaaacagcccttatgaattgtctctattttagtgatatgactaatcatattaatatggtgcagttttattttaagaatttttccagaaccactgactcatccaatttattggttccactgggaggcaatcaaatgggactggactaatttctaaaacaggaaaatcaagacaatgaatagtggtgtcttcctcctgccccctattttttttgtgcaaaatgaaaatatgggggcaaaggagaaataatttcttaatcacattatattaaatacttacatagtaatttagtgtagtgattaagaaaatgggttcttagttgcaatggtcataagcaggttatcagtttctttatctataaaatggggctggtgaaagtacccacctcataaggactgttaaggagattagataggctcccacttctgactatatatccaaaggaaataaaatcactatcttgaagagacatgtaaacttccatattaattgcagcattattcacaatagataagatatagaaacaacttaagtgtctatcaacagattaattaataaagaaaatgtggtatacatgcaaaacaaatattattcagccttaaaaaaggaaaccctcccatttgtgaccacatggaagaacctaatacattacgccaaatgaaatgaaccacacacagaaagacaatactgcatgatctcacttatatgggaaatctaaaaaagttgaactcatagaaacagagtagaagggtgattaccaggggttgaggagtgaggtattggggagctgttggcctaataaattccagagacctaatatacaacatggtgactacagttagtaatgtgttatatacttgaaatttgctaagagtagatgttattctcatcacatatgcataaaacaaaacagaaaaaaccacaaaacataagcatgtgaggtgatagataattagcttgattgtggactcatttcactaggtatagtatatcaaaacgtcaggttgtgcaacttaaatacaaactgttttgtcaattacatctcaaagctgaaaaagtcaatttgcatgactaaaaaacagaagattcgatggaataacgcacataaaatgaccagcgtagtatctggcacatgataaaaattctttgtcatcattagtgactatcatttttatctatgcacatttttatctatgctcaactgggtataaacatgcctgcatatagactatccctacgttttgtcactattgaactcagctgcctagttactgcctaataagcatctctgtttcacctcttccactgtaggcattcagtgtgttttgctgctgactcaaacaatggtacaccaacagaaaacacccatataaaaatgtcattgcaatgatatgacatctgaggaggattttaaaatgcagaagcatcttgttcttatccaattgggcaatgaaaaaaaccaatgagaatcttcatgataggtccacgtatgctcccatacgtccaagtgtatacatatctgttcctcgagtcatcacaaacagaagtcatcacaaaggacagagtgagcagaacttaaaaccacccacctggcctatgtgcaatgcactttttaccaagtgataagtttaagttattatgagatagaacaccacttccgtggcatctgactgctctagtagctacaaatggcaaacattcttcttcttttaatttacactcagagtgcccacaatgtgccatatactgtgccaagggccctggggaaaggtaaggcaaataaggcaaaatctctgagctaaagataagccacagaatatactatttctccaacaaatacctagcagaggacctggctcataattgatgattaataaggatttgctgaatgaacaaatgtacaatttgggaagtcctatttacaaacctagggtagaaaaggaaactaatcaagccaaatttaggaagtctctgttcccagttaccactgccaaaaaccattatttgttttgtagcttctaagtctggccaggaagcacatgttttttcttagttaggccattgattcttagtgagtaccatcaccttgtgattattgctactaattaaggtccactctgaacttttatagtagtgagagtgacttaatataccaccattggcaatgagaagaatcagcttgatttcaccagcctgtaactccatcccataagttctccaccttttaaggtggaagtagtaaatcagctaaactcttccaaaagttttgggagttgaccctttgttagctctcaacgttcccactgtgttctcacagcatgaaagtgctccaccatgatccatacaataacaggcactgttccactgaaatcaacagaataaagggctcttacataccccttttcagctattatttgtagtgtgactacaatcatgctttagctttcaagacactcaagaacttaaggatgcaccatctgtggattcttgtcatcacataaagcaaataattgctttttaaaaaatccatgccactattgctaattttttcatttccacaagctaccctgctaaacaacctctgggtatttacatagcatatttgattatgcagtggttttgtgtgtactgaacattatacagtgagtccatgtatcctgaactcaccatctggatttttcaaaccaacttgcctgctttcttttatttttagcaggaggatgataacacccatctttctggcctctggagggattaatactcacaaaagctgtaaagctgaaagactctgcatctgtgctgaatatgatataacaaggtatatttgtaacctcgtgcttaaagagacctatctactgggcatctccgactaccagcagctaagcacattattgtcatcaaatggtatttattgaacatgcagtaactgtctggtgagctccaaattaatgggggactcctgagaacctaattttaaaacattatctccctctttgttatctgtatttgtttgtttcagagcctgacatgttaattggggctcaggactccaacgcacaactgcaattttccttttgaaagcaagaaagcggctgcctaaagacagctggcttagctcctggagttcagaggttggcagggagctgtgcagccacaagtgccagtaagtgccatgaatacggcagaaaactggagcttgtctcaggtacaggctgagaaatagacaaacaaaccgtcaatctcctttcagagtctcccttcccataactactccatccgagacaggcatttgtcttatttttagtctcctcctcaggagctttccatttttatccctagtatctttggggacttggtgagtctggttttgagcctctaattggcttttaccctctaattctttttcattcacccagaaggcaaattggccctttccttgtctactttatcccaatttctttcactcggttgcctcattttgtttttcatcttccaaggagacttaccctcttctctcctctcacgtatcactggagatctgtcaagcctgccttaaccctgacttccttaaccttcccctgatgaaggcttccccagctggtaatttatttctctaatccacagcttccacagtacttggtttggattttctctgtaatacattctaagatgatttatacccattgataggcatatgcagaagataaatcttcacacaccatacagcactcaccagcatactgagcctagagcaggagcttaaattattcttagacaaatgaatgctatcatttaaatattataagtactttacaaaaagaatgttttaccaatgataaaatcaacacctaacataatctaacagtgcattaacactgagaacaaacaaaattatcaacagtagcaactaatattgactcagcacttaagaatgctctaggcacatagcgagatgctttgcttggattatctctttgaatcctatcaataacttgatgaggtaggcactaatattatagaagggaattgtagcttcaggaattaactttctccagggtatacagctaacaaatagtagatctgggaatcaggtccatgtctgtctgacctcagaatttgctatcttagccacttcacttctgtcttctttttccttgtgagcctgtttaaagggatctagtcaggctcaaccagagtgactttgagaatttataaaaccatatatataaaaataggtgacagatacactgaatactccgaggtgactttttaatttctgtagaaaatatcctctgattcccattccggggcagccagaacaaagcaatggccaaagaaagtttacttactccccagttcttagatggagttatgatttcttcactaaacaatgaggaggccaacctaggttcttagagcaaatcttgttttctagcgatgaacatatttctccttgtctttgacttagatgttatttgcactagcctaatttaaattgttaacacagtacaaattttaacagaaagacagaaagagaatgaatatgaaagatttgggctgctgctggtgatagtggggagctctatttacttttggttaaatgccagtgctgtaagagtccaaggtcagtaaaagaggtgtgaaaccaattagggtttctcagcttctggctgctggaagatatgcatattgcacacccaaaatatacagttttgtaaggaggtatcgacaggctacagtcactctgccatgctgcacaatggcatggtgccaatctagcctgagacaacacatgtccactcatgagttttgggttaaaagtgctgcaacccaaaagaacagaggtgaacaaaagagattcagcaagactgggaatgaagcatgaatcacagatagaggagatcaccatcaaaagcttaggaaaaaatctgccaaagctatatagctctctgctaatgactatgattgtaatttctgcatattttaacagatgttctgtttataaaactgcaaacgaatttaggggttatgagtaaagccaggaggccctggagatgtttctttgtatgattaactgaccacaggccatttgttttacaacaaagatgcacaatgatccatagtccatgatttataccagcccatgtatactaacggctgatgtctccatggtacttctcattagcatcagaagagggattgcagggaaacagattatgggaattgctctcccattgctcaacacgatagttcattagtgggtgtggaatcgatctgaaaaaaaacctaagacgataatcataagctgaaatttgaattattataacaattaaggaagtcaattcaatcatgaaagaaataatatggatttttatagctctaggtccatgcatcttgataattggaaatgagaggattttctgtaatttccaaataaaagataaatataaataaaagataataataataaacataatattactgacttgtactgattacctatctatggatcaagcattctggtgggtaatttatataaattatctcacttcatcctcacaactgtgtattgtaaggatccccgggtactggtaccagaatggcatcaaggttaggggcatcccaggctgctggctatttcttttcctcctcaagacccttcttcttggagggcactctctaatgctgtctctaccaaattaattttctctgcttcctcatagccactgctgcctcattacttcacagctcagacttgctctcatagtctcatttcaccttaagttctcagagctaaataccctgatggtatttttttctggtctcaactcccaagagaagaaatctgatagactcagctaattttttttggggggtgggggggtggactaggtcacataaaaagtcataagcccatctatcgattggttacctttctgtactcctgcccttcggtctaatcagctgtgcttggatggggtaggaatgactaggggttcaaaataggggggctctccaaggaagtgaaatcaggatctccaagagagatccacattctcatgctcattgcaacaccattcccaatagccagatatggaagcaacctaaatgtctgtcaacagatgaatggatgaagaaaatgtggggtatgtgtacatacacacacacacacacacacacacacacatatacacacatgtatatatatgtgtgtatacactgggatatcattcagcctttaaaaggaaggaaatcctggcatttacaacaacatggatgaacctggaggacattatgcaaagtgaaataagtcagatgcagaatgacaaatattgcatgatctcacttatatgtggaatctaaaatagctaaacataaaaacagagtaggatagcagttaccagggcctgagggggtggggaaggagaacatgttggttaaggggtacaaagcttcagttatacaaaatgaataatttctgaagatctgatgtacagcaatgtgactatagttaacattattgtattgtagacttgaaatttgctaaaagggcagatattaagtgttcttgccatatatacacagaaaaagaggcaactatgtgaggtgatatatatgttaatttgactgtggctaatattttatgacacatacatcaaatcaagttgtataccttaaatatacacaattttaactgtcaaatatacaataaaactagaaaaagaatagggcccctttataaccttttaagtggagactggagcacagaagatgcccttggatggggaaatcaccatcagtaaatacagttcatgctgagggtgatgggaagatacaggctgtggggtcaggccgcctgcctctgcctcttattggctgtaggaccttaggcacttatgttaaaagactgagctttattcactcacccataaaatggaaatattacaattacctacttaataagggtgctatgagagtgaaagggatgtacaaatgcttagcacagtgcctggtgcagaatccccacttaataaatgctggctattatcataatcccgttaatacattttattaataacaaattataattgcaataacaacttctccagagctaagcccaaattcgaagatgagttagtgctccaagtggccccacttaaccatgctggaatgaaagggaggagcagctgcatgtgtctgtcattcaaatcaatggggtaattctgtttttattgtgaacagacaaaagctgtgtcctcggctgggtccaaatgatgagattctttatgactaactgaggcagaggtgatattctcagaccttcctgaatgacccacacaaacacccaatggttcttggagcttaaggagtaacaatctgactgaggaagtcaccacaaatttcatgctctagtcccagtttcacgcccccttttctcgcatccagagtcttatttcccaaatttgctttccctgctctctctagaatgcattggatacttccattggaaatgtctaggtcagtacctaacatctggcatagctatctccaaatttgttggataattaaattctacccaagaactcaacaggggggtggcaaatgaatacctgagggcactgcctggctttggaaatttgagtgcatattatcactatttgtgtgtatttgtgagcacaaaagaattagtaagtgctcctgaagcatcatctcattccatctgttgtcaaagttcacattaagcaccaaatccaagggagcataatgagttatgtgaaaatgaacttgtgcttggaatttcagtatccccaggtgatgcaaataggcacatttcagcttgttctgaagaatcccaggctctgggacctgaacatatggtctaagttatttagccagataagacatgggatttcctacaagtagggttttgtcagcaggttggtaaacagtttttcctcagcttggacactccatatcatggtggggatgggataagtatatagtgaggtctttccataaaggacatgtttacaaaaaaggagatcaagcctttaacttgtgccccaaggctcagaagccagcactagttagttatgcaagtattttgaacccacaggacttctggggaattggaaggagtccaacctggctattagaactaagcttcggataaattttactcctgtcctcactatcaacattaataaaatgttcaaggagctggaaccagagccataaagaatgttcatgtcagagaaagcaggatacacagggacaagaggagtgaaattcagcttatgaattgttcccttcatatgctccaaatgctacttctctctccaaaacatgtttattccatagagcgcatgcctaatgccatccacacctaaatgctttacagctactattatttagctgaaattagaacactttttaagtattaggagatcaaatccccaggcaatttgtaatgcaaaatttccccacattttgtatttctcagtgctgcctgaaacccgacattagaactatgtaagccccagcaaatgcctcatgtcagggaatgttctaagagagtgctggggattatcagccacatttgttaactttagtacaatttagacacttttaaagataaaggtcattaatattttaacataacattaagtttaaattcagaactgagaactgttatgagaatctaaccagttttaattcggcatttaataaaatttatttatgttaaaagaaatactgggtatcaggagaaaaaaacacaatagaatgaatatttgaaaatattatattctagctaagtcatgcagctttatttaagtcatcattagcaggcctagcaagttaaatttttcaaagccctatgacatgtgcagctcctaaaaatataaggaaagcttagcccagtcaccctggggtaatggtaaggaatacaagaccaagttaggcatccctgggttaaagcctgccatttataaactatgtggtttttggcaaattattttgcatctctagaccttggtttttctatctgcaaagtagggagaaataacagtgcttgcttcatgtagttgttgtgaggaaatcaggtaataattatatagttaagctggttgggcacggtggctcatgcctgtaatcccagcactttgggaggccgaggcaggcagatcacaaggtcaggagataaagaccatcctggctaatacggtgaaaccccgtctctactagaaataaaaaaaattagacgggcgtggtggccagtgcctgtagtcccagctacttgggaggctgagggagaagaatcgcttgaacccgggaggtggaggttgcagcgagcagagatcatgccactgcactccagcctgggtgacagagggagactctgtctcaaaaaaaaaaaattatattatataattataattattgctaacatttattgagcactacttcctatgcactaggcattgttataggcattttaagatacattatttaatcctcacaataacccaatgaagtaggtactttcatctctgtttttaaagatgagaggaatccgatgcttagagaagaccagtgacttgctccaggtgtcactactagcatctggcagacccgggactggaacccaaggccatctgtgtacaaagtttgtagttctgttgcctgccctctcccctccatcccctctaaccctgctctgatccattgccttttaaattgactatattttcaataacaacataaacaccttgagagccagggttgtgacttgtcactcaataaatattcgccggatggattactgactcttctgatgttgtttagaaagacaaaatcagaatctgtttagaagcaatgaggagtcccttagaaagcttaaactgaagtgaggatggagactgtggattttctgatattattatatattagacatgaatctcttcaaactggaacaaaaactggtaaacagaataattgcaaaatatgtgccaatggccttgaaatcaaagaggagcaggtcgcctgaggagaagcatatgtttaatgcttcacactccatgatgagtcctggagaagaaatgaggctgggcagaaacaaggcagcctatgtggggttcacatccagaaatgaagaaaagcattctaataatttaatttgaggggaatataatttctcaaactccaagagttgcttcagccttcagaaaaaagctgttgggtcccaagatggcaccataaacaacggcaattctcctcctcaagctgtgaggtcagattttatgtgctgggaagagattaactttattgcaaggagaaggatttaattgcagagagtgattagccaaatgcttagatcaatagaatgcaggtcaaactgtgctcagaaatatccatggctcttattacatagaaagttgaggacacagaaaccatttggggaccctgagccatttgtgcatgaagtcatctgcaaacctttccctagaccgcagaagcatccttctctttacccagcaatgatggcatgctgactcaaggaacattcacccctccccccaactcttggcattagagaaagtcaataaaacagctgggatccttgaatgctgttttcaaaagtagagaaaggatcctgcctggtctagctctttgttgtctaattgcaacaaaaatcaatggttttgaaaatggaaagcagatagatcattcctcatttatccaagatatttgagcagaagatggagtgacattgtctaacatgctttaatttttgctctcaccaaagccctctttattcaatgagtctgtgtttgcactgttcttatgaagaaattcattgatagcaatggaatatggtaaagcagatgagcctgtagtacaaattgcaccctaggaaaaaaatggagtggtttaaaagtggtattttacgtaaatgataccttactggctaaccaggcatcccaacaagttgagactatgcagaggggatgtggcttaaggggaaggctgtgtttgccaactgggagctctaaatatgttgcttcacctgtgatctacacctgacaagcagaggccccaaattcccttaattatcggcagctcgatgagtctgacttcctagttcttatttatttcctagaatccaaatcacatgatggaaaagacctagaaaagtgtcaaatccctaccttggcgaataaagccaataaagaagtaacatcaagaaaaaggccaactctttcagaattttctgggaggcttgcagataacattttactcatcctgaaaatacatttgtgaatttggtggatgacaaaatgaactgagtgtgccactgaacatatgaagaagctagggagacagtgtgtgtgatgcgcacatacacacatgtgcacaagcagaaacacgcctttatgcaaggtcacctagagtcagtgatagggctatgaattgtgctaagtttcaatctctcccaccaagttgttttaagaaactgtgcatctcaggcctaccaaggaaatgtattcttctccctgatagtttgatgcttcatttccacctttcctaataagagctgtcattaattttaggttgcctaggactaaaacatacctccaggaaatagcttgtgtataacctttaaggtattgctcagcttgtaaaatgcctctagaatcttgcttgtaatataaaaaaaagaaaaaaaagaggtacctgactctttccattccttcatgcttttgctgcatggtctgctatgcagactgaccccaaagtccttataaagtcttatgttgttggccatcatcatatccagcctggagctttcccaacattaaaaatgaagcaacagaggtgctgtgatataatggaaggtactctgggagaagagtcagcatactggaatttttgctgcagcttaactagcagtcaccaaccaggatagtatgaatgagtggagtaatctctgcccttttttatccttggctgacaaatggaaaaaggacatgacagaatgtcgttttgcaaactgctgagtgtcatgtaatgcaagacactgccgccacctgaggaagtataaaagtgcccccgacaggggagcaggcaataggggaccttagttttagccttggctctacttctcattgtcccatgaccttaggtctacccctgtgggtctccatttccctatctgaaaaagagggtattggtcttatgacctaggtgctctgaaaccttgttaccctaagtatggatcctagactaggagcctttgggagacctgggggcctggcagaaatgcagaatcttggcctccacccagaccaactgaatctgaacttgcattttaacaagctcctcagatgatttgtttgtacatgaaagcttaagaatcactggtcttcaagatctcttccagatttttcattctataattatactataagtggtccagtgtagtgcactgtcacagaacatctatttcatgagacagtggcataacttgctattcatggctaaggaggcatggcagtatgtttttgcttataggtgtacttcagcacagtcacatgagaccagtcagttctggcagaggaaaagtttgtcttggttcttccctatctttttctctctgatcacaaagctcaccaacactgctatccagttgtgggtttagatatacaagatgatcatatttcatattaaaagataatgtcaaagttgctaagataataacttatgccaggcacagtattaagtactttcatatagacctcatttcatacttaaaacagccctgggagtaggttctattgttatgttcatttcacagatgagaaatgtggatcttggagatgtaacttgcccaaattccaagccagaacgtgacagagctgggatttgaatacagatctgactcacaccagagtatgtgcttaaccaccagggatatgccctctccaactccttggttaaacctcctggggtgccttctttttttttttttttttttttttttttttttttttttttgagaagacagttttgctcttgttgcccaggctggagtgcaatggcacgatctcagctcactgcaacctccgcctggtgggttcaagcaattctcctgcctcagcctcccaagtaggtgagattacatgtgcctaccaccacgcccagctaattttttgtatttttagtagagacagggtttcaccatgttggccaggctgttcttgaactcctgatctcaggtgatctgcctgcctcagcctcccaaagtgctaggattacagacgtgagccaccgcacccagctatcttctcttaaatattctcactccacctttgtgtcctcacatcattcttgctatttcaaacccagtcatacaatattttaggtttgtgccgtccaatgggttaatcagtagccacatacagtgattcaaatttaaattaaaaactcagtttcttatttgcactagatgacatttcaagggctcaacagtcacatgtgcctagcggctaccatgttgaatagcacagatatagaatatttccatcgtcagagcaagttctattgcatagtgttgttttagagaatccaattgctgaaaatcatcactctatcactggccttgttctgtgtttcactgcttctcagtattgaaagctctactgttaaatgcacacatttagaaaagatacctcagagccccattcactaagaggtaagaggctgtctggaaaggaagaactgaccaatcctgaatagccaacaaactgggagtcctaaaacttgaccctgacttcaagttcaaagacagcatcctagaagccggggctctggcgtgtgttgccagccttgccagccttggctctcatggttcactgtgacaactcctcatttctatcaggggaaagaaagtccaatcaggcaagttttatttcctctctgaaataaaacagaattgacttgccaaggtatctgcagggacatcaactgttgggccttaaattacctggtaactcttctagtcaattctactttcatgttggagtttgcaatcaacatttatctctataggacagaccgtctgcaggtttctaataccatttttattattaccttgtaaatgtaaaatcctcgaggcagaaatgccagctgctaacactggtgtgtgtgtgtgtgtgtgtgtgtgtgtgtgtgtgtgcgcgcgcacccacttctccagtgatgaatgtccttgggtcctggagtttccaacagcaacaaaaagacataccaaggacttgcctagaaattatgtattgtatggatccaatgtcaggggctttgggggcagctttctctagtagacctgctgagacagaatgaccttccctttctccgccagggtaaagccttctatgtggccgtcaggctttctgctttggaaattaaggcaaataatggagacagaaattcttggcaaatgctcacaagcagacacttcacaactgtctctctgacaggtattaataaataatagttatcatttattgaagcccaactttaatttctctgctaatttagaaattcatcaagtctctactagaatagttctgggtctcaaagagcagccaacccaatgaggaaggtaggtatttaatctagtaagcacccaaataaatgtatattgactaattataataatggctgggaatgaaaaaaataaggcactatggtagcaatgaagaaaggaggccttatttagagggagtggtcagagaagaccctctctgaggaaatgacgtatcagctaaaactggaaggacgaagcagctagcctgcagccagagcttagtaagcaaggagtgggccacgaggctgtgggcacacagagaccagatcttgcgaggtgagtcttggtaaggcgtttgctactaagaacaacgggaaatgattggagggtttgaggcagcaggctgacaagtgcttcatgtttttagaagatcactctagctaaagtgtgaagaatggattggaggttacatggagcagagagtggaagcagggagacccggtaggggctctgtctgtagtgcaggtgggaaatggcagtggcttagactcacatggtagtactggggatagagataagtgaagaaatctgtgagatatcttgggggagtacaaaaaaggacttgctagccaatctgttgtgtgggggtagagtaaggaaaatcagaaatcaaagatgactctcaagtttcaggcttgagaagctggtgggtagtggtgctgtgtgccagaactggttttgcattcataatttgcaagcctgacaattagccttgtgaaagtcaggtattgttactaacatctccctttacagattgtgtattagttcgttttcacactgctgataaagatatacctgagactgggcaatttacaaaacaaagaggcttaatggactcacagttccatgtggctggggaggcctcacaatcatggtggaaggtgaaagtcacgtctcatatggtggcgggcaagagaagacaatgagagccgagtgaaaggagtttcccgttataaaaccatcagattgcgtgagacttactcactaccatgaaaacagtatggagaaaaccacccccatgattcagttatattccgctgggtccatctcacaacaggaggcaattatgggagctacaattcaagatgagatttgggtagggacacagccaaaccataccagatgcggaaactcagatagagcaagtaatttgcccaaagtcacacagctggtgaatcgtccagccaggatttgaacgcttgtctatgagcaaagttcatgtatgctctttccttcaccttcactgcctcatgactgtgttttctcattcactgacttccagtctctatggctcctgtctttttttttctttttaatatatatattttttattatactttaagttctagggtacatgtgcacaatgtgtgggtttgttacatatgtatacatgtgccatgttggtgtgctgcacccattaactagtcatttacattaggtatatctcctaatgctatccgtcccccctccccccaccccacaacaggccccagtgtgtgatgttccccttcctgtgtccaagtgttctcattgttcaattcccacctatgagtgagaacatgcggtgtttggttttttgtccttgtgatagtttgccgagaatgatggtttttagatggagtcttgccctgtcgccacccaggctggagtgcaatggtgcgatctcagctcactgcaacctccgcctcccgggttcaagtaattctcctgcctcagcctcccgagtagctgggattacaggcatgtgccaccatgcctaatttttgcatttttagcagagacagggtttcaccatgttggccaggattgtcttgatctcttgaccttgtgatctgtccacctcggcctctgaaagtgctgggattacaggcgtgagccacggcgtccagccatatggctcctatctctattagtctatagtaagtgttttccttggctcatcactccgctgaaagtgtttcttttttggaaaaccttgtcccacatctccatctggctactccttcttgttccttagaatcttagatttggtttctattctcctgccatttgctatcctaatgcacattaaactttatagcaatttctttattaatcatttgatttttcccaatagactgtaagctctgtgaacataggatcaactatgtatttttttttttttttttttttgagaaggaatctcactctgttgcccaggctggagtgcagtggcgcgatctcggctcactgcaacctccacctcccgggttcaagcagttctcctgcctcagcctctcaagtagctgtgactacaggcgcccaccaccacgcccggctaattttttttttttttttttttcagtagagacggggtttcaccttgttagccaggatggtctcgatctcctgacctcgtgatctgcccgcctcggccacccaaagtgctgggattacaggtgtgagccaccgtgcccagccagaatcaactatgtattatctgtcactatcacactaaagcctggcactatgcctgacacactgttcattcatcacatctcgatgcatatttgctaaatgaactcctactcactggggaagttgagatacagacttgcccagtttaatctaagagatcaggagcctggattagtggtcttattggcatgctacagggaactgggcccaagagctctgagttaactttggacttttgtcactaactagttctgtgacgtgtggaagtttccattacctctctgaaccttagtttccctcttagctcaaaacagaggaaagtgaaacctggcactctgacctcatggggtgagaataaaatccaaatatatgtgaaacagcttgcaaaggtataagaactatacacatggatggtatctcatttgcctcaaaataacaaagtttctcttcagcatgaagattctggagcctagtagatctaaggaggcttcgttgtagtacttatctgtttgtttatgtttgggcaagttgtcttctctgaactgaactaatgaggataatagcactactactttcccaggcctcttctgaggactaagtaactctagtgatagcagtatatatatatatactgtatatatatacagtatatatatatatactgctatcactagagttacttagtcctcagaagagtatatatatatatatatatatatatatatatacactgctatcactagagttactttatatatatatatatatactgctatcactagagttacttagtcctcagaagagtatatatatatatatatatatatatatatatatacactgctatcactagagttactttatatatatatatatatatatactgctatcactagagttacttaatgtgtgtgtgtgtgtatatgtgtgtatatatatatatatatatatatatatatatatatacacacacatttccattataaaaccatcagattgtgtgagacttactcactaccatgagaacagtatggggaaaaccacccccatgattcagttatatcccgctgggtccctctcacaacaggagggaattatgggagctacaattcaagatgagatttgggtggggacacagccaaaccataccagatggggaaactcagatagagcaagtaatttgcccaaagtcacacatctggtgaatcatccagccaggacatatatatatctacatatacatatactatgaatgaagctatatatatagtgtgtgtgtgtatatatatgtatatatgctatatgtagagtatgaagcagtgcctagtgcataggaagcacctaataaatcttagccttttaataatcattaaaaaaaacccctctctttacacacaaacacacatacctcacataccaattcaacttctacaccaacaattttggagttacattatttggatgcatatttttgaaaatgtcactaagaataaatattacctcatgcccaacctcaggagcagcttcttcaagcacagttacctataaactttgtaccaaatagtatgcccctccaaaaccaacagacccttctttgtagaagtcaagtggaagcaacgcttagaggtatgaatcagtgtgtcgctcggttccatggagacaaatccaagtaggcactggcagctgtccgggtcctcagtgagctgaagcaggccacatggcaagataatttttaaagtttcttagcatcaataaaacacctcctttttaagagctccatctcttaattcaaagtcgaaaccttctattttccactgctctgctccgctgctatttcagttattagaacacctgctgtctgaacgagtttgcctcccaaatagccgaataatcaaaagatgaggagacttgcttaagcagcaggaaggaaaactggtgaaagaaagaaagggttgacaggcagcaagaggaggagaatccaggaataaatgggacagaaacggagagagcaagcaggaggagtcctggcaagatggcaacagtttagaccaggacaggaagtggcaagaacagagaagagacaacaccacactcaggagaaggcaggagaaaagggaagtaaaattgctaaaccctctcacttgaagaatatcagtaaggcagtggattgtggcagttaaagccatgacttcggacacatagaacagggactgaaaactgtgcatacaaagtatgcactcagtaaatgctttataatagattatgagcatcagaatgggggtaaaacactccctccccaaataaatactgaaggtagagaaaacagctaaaaaaaaaaaaaaaccctccatatcctatggtctttttttttctcttttttggggagacaatgttagttttctaatttgccatcttcttcaaacgctgctttcttcccttgtagctcttctacatgaaatccaaagatgacaggtccttatgttacagtaggtagctattcagaaatgagcagagtaggagaggcctcccctgcaacacacaccaggaatgtcaggagaccatcaggtgatggtcaggcagtgttaactgtctctctaaaataataattggtcatggccagtgccagggaaaggcacccaatagatgggaaagtctcccaacagacagaaacatctgaaactggtgatcagcagcttcctgataagatctcaggagttgggtgaatgggctcaagcatgcgcactaaggcaaaatggcagattacctccctctggaacactggattggtaaggggaaaagcacctcaagtgagcatgtatacaactttagtaaacacattgcacatgtggtcccccccaagtgctggcaggccactgctcatgcagacagcccaccccaagggaagaatcaggaaagaacataagaccccagaggtatgacaacatggaaaaaccccaagtcaaaagtcaaactgcgcacttgatctctcaagttgtctgcttggccctcttccaagtgcactttccttcctttcacccctgccttggtctctccttctgtcttatgcccctcagttgaattctttcttctgaggaggcaagaattgaggttgctgtagacctgtacagatttgcctctggtaacatactttggtgccacgtgactcagatacgttccgctgctaacacttacagtagaaggagacatggaagccatctatcctacttctgcagagctggaatctccttcatatcatccctgaaggatgtgcatgctggcactgcctacactagtctgctgggggaaatccaatgcttccagcaaggtccattctcttccttgtgaactggattatgaaagttcctcctcttaacaagccaaagcactctctgctgttaacatcatcactggtcttaagaccttctggagttaattacaaaacccggatttcctcttccaatgtatattcattcaacactcctgcacacactttcattgtatgcttattgagagcagagaggccatctgtcaggttaatttttatcttagcaggttgcacaatacttgacacacagtaggtgctcactaagcatctgaatgaataaatgatattcacagaatcaaaggatttagagtacctactaggggtggtaaactaaatgccttcaggagtgcacgcaagtgaaatacttaagaggaagggcgtggcttgtggctaattgaggagtgaatgttctgcctaaaggcatttgaattcaaattgtttagaagggttgattagctggacagacccttttactgttgggttgcagcctgcgggctcctggtttgtgactccattttaacctatccccacttttccacacacacacactttaggaatctgaatagtctcaattatattctttacaaatgctaactcatgctcagaacatccctaaggatagggaaagcaagatcatcaaaactgttcattatttaaaaatctattactttgagctgaaagctgctttgttgaaatttttcccaattgctcctagtcgtgccctttgagggtggcaaaacaaattgacttcttttctgtttgatttccctgcaaatatttgaagatattcaccactcctccaacctaagtctgctccagattaaagttctttcagccgttcctaatatcaagattatgaaacctccactatcttgaccactccactatatcaatattcccctccaaagtgtagtggcacacacttacagtattattaataatagtgggctcatgcctgtaatcctagcacttttggatgctgaggcaggaggctcgcttgagcccaggagtttgagaccagcctgggcaacaaagcgagactccatctctacaaaaaaattaaaaaattggctgggcatggcagcacaagcctgtaattttagctactagggaggctaggaggatgacttgagcccaggaggctgaggcggcagtgagccatgattgcactactgcactccactctgaacaacagagtgagactatctccaaaaacaacaatactgaaacattttggaaaagatccaaatatatgacaatagaaatttagtaaattttggtcatcttctataatagagtttatgcgcctattaaacattatgctaaagagcatagaaaaatatccatatcagaatattaaatgaaatcacattacaaaatgatgcattcaacatgatttcaattttatttaaaactgatttgagtaagtagaaaacttagcatgaagactgcattgtccaaaaattacttcaataatcaaataaaaacacaggttttttattaaacatgatttcagaaattaaaaatttaagattgtagctcctttaacattgaagagtcttttgtcagtttttaaagtcagagacccatatggaggagctgattccaaaatccatgttctaattccttatcccttctccccaagatttgaatacagtcagtttgggtggggcctgagcatatttttaaaaagactgtcaggtgattttgatgaataccagtggttaagaattaaactagacagatttctatcaatgctgtcaaacaacatataccttttcttggcagctgcatgactttttgacttcctcttggagttaaccaagaccctggaggcttgttgtgatgagcgttgctcttgagggctactcccctccctgtatgcaggcaggtggctttgtaaaacctcaggaaagatactggcattgatccccacacaattcatgttgctacatttggcccatcatctagagtgtcaagatctttcttttctgcctcctccttccagctgtgactcatcctaaaactcaatcagaatgacatttaaggtacttatgcaaatctcctctttcccaaggtaaacattcccaatgtcatcaaccagaaagcctaagacatttttctcttccccactgacttggacacctggcctagatgctcaccacttaggacagagatgctacctccatcccaccaccaccatttttaaaactttgatgataaatgtatttatatgcaaataaatttgcatatatttatagtgtacagtgtgatcttttaatatatgtgtgcattgtgaaatggtaaatcaggcaaattgatatttccgtcatctcacacaatttttttttattgtgagccttttcccttttaatgtagatcctggaacaggatttgaaaaggctccaatttgttgcataaaagtctctaactagggtttttaatgactaaagtaacataggcttgttgtaaaatatttttcaaaaatttatggaaactcgtaaaataaaagtctcccccatttccaagctcattttcccaaggcaatcactattcacaacttagtggtatgcgccactttacatctctcatctaggctcagtttcatttctttgaccaacggtcaaatatttctgccacccatttcataacaatttattctgatgccaatttaaaattatcaaatcagttcatgactctggctcccataaaacaccatcctcccatttgctcacactgctctgcaccaattccttttctccaaagtcatggatccctttccacctcatggccttgcctatgctgttttgtctgcctggcagggctgccctatgcccaaaccttaactttaagatcacttcttcagggcagccttccctgatcttgtaagactgggtcaggttatctcagcacagcctatgatgactccattacagaggagccatcctgctaggagtttatatactccttttgtgactatttgatcaaagtacgtctttcccgccaaattttaaactctacgagggcatggaaagctgtcttgatagctgctgtggccatagcacttagtactgtgtctggcacataagacagccaaacgatatttgttgaataattaatgaaataaattgcaaagacattcatctatgctaaaaaaaattcactgcaaaaaaaaaaaaatcacgaggatttttataatcccttcaacacaatctctgctccctctaacttggtggttgatgggcattttctcctcactcttattccatatgataagatgtccccatccctgccccaagatttataagccactgagctcttcttgaaaacatattgaagaaacatcaccaacattcaccccattgttccgagggaactcacatattttgagcaccttaccatgtgcgggttctatccccttgcatcttaagttatgtaattttctcagtgacccatgatatagtttcattttttctactttacagatgagaaatctgagacccagagagactaagtagcttggctaagatgatagaggaagtaatggtagggatttgacattaacaggttaatagaaaggatgctggcctggacatgaggagatgtgagttttagtctatcttcttccatgaattccttgggtaaccttgagccattactttaacctccaagttttgactccccgatgtaaagatagtgtctgaagaattggcacaaggcctgcaaaagtttctgaccaaggataaagtacagcatgctgtaaagatgatcattatgcctctttcccctaccctcaagaaccaacagatggccttctctgcatttgaaaatcaaacattcctaccaaggtcagttatgcctacaaatcagtgcaggctttcttctcgggcacaaaatctccagctgaaaatcagctctaattctttctcttgctcaggccttgctctgaataatatattttgaaaatgaactattttggggccaagaatctgtaaatctgagctgattcatcactttcaccaccaggctgctgctctcctgcatcttctgtgttgtgagataaagatgttttttcttcactaacagtttctcagtgggctacatggagagttctccttttgtcatgaaaagattctctgcaaaatactacaaaacctaaggatgagcacattctcaagaaatcatctggagtaaatagaacactggggtgggatgggagtatgcagagagagacacaaccacagaacagaagagctgaaatggaatacaacatggcacctctctttgaatgtggagatggcaaagtgtcaactcctgaccttcctaacaaaagaataaggaagtgaaaaaggtaattccagaaaatgtactatttaaaaactagctccatctagctttggaatagttatcgtttcctccataagatttagctttctatgtttttttgtatgaatgtatattaaaatgaatttgctttttttaaagaaattacagagatacccttaaaaacatgctaggcagatttgtcaaaaattaaaaatagaactaccacatggtccagcaatcccactacttggtatatatcccaaggaaaagaaatcagtatgtcaaagagatatctgcactcccatgtttactgcaactccattcacaatagccaagataagaattgaatgtataatacaatggagtactattcagccataaaaaatgaaattgtgtcatttgcagcaacatggatgagcccagaaaacattatgataagtcaaagccaggtacagaaagacaaataggcacacaatctcactcatatgtggaatctaaaaatgttgatctcagagaagtagagagtagaattgtggttaccagaaataggggattgggagaggttggtcaatgggtacaaagccagttagatgggaggaataagttctggtgttctgttgcacagaagggtgactatagttaacaataagatattgtaatttcaaaacatctagaagcaggaattttgagtgttctcaccacaaagaaatgatacatgtctgaggtgatatgttaattaccctcatttgattattatacattgtatacatgtatcaaaacatcacattgtacccatataggtacaataattttgtgtcaattaaacattaaaaaattttaaacacacaaaacaaaacaaaaaccatgctaggtaaaatggagcagccagttaaagaataaaagcaattggcatggattctcatttgtggataattgagaattggccaatagtttcccaggggcagaaaacactccttcagaaaacctcctgtgttcagtggaattttaaaatgcaatataaaagagcaatgtgatcacaaaagcacactactgcaatattatatataaaaaacgccatgctgtttggggatattttcttcccattactattcctctaggctatacctctactgagctctagaccatatttccaaatccacttgcaacactgatatctccatgtggaacgtcaggctgctcaaactcactgagtcctaaattgacctccgtctcctcccctctccaaatcttcctctgctgctactttcttcatttaagttcctaggactccatccgtcaaattgccaacctagagacacaggattcattctgagcacttctcagctgcaccattgacctagatagaagccctactaattctatctcaaaatatccctctcataaatctccttttccacgccatgccctctgcactgcgctagtcctgggccataccatctctcaccaagattagtgcatcgccttctaataggcctccctccttccatcattccgcctccttgacagtggtacattcagccacaccctggcttctcaccaggtcactcaccacacatcacacacaacacaaccttctcacatactaaaaaatatccacagagaaacacacacaatacacaatctccaacacctatatatatatccacagacaacacgtgcacatgcatgtgcttacacacatgtacaattgcacaaatcctcaaatacatcaacccacctgccatcccttaataccatactcttctctcccatttctagatgtctcttaaggctatttttatcttctgagacctcctttcttcactgtcataccacccattaatgcccccttgaagctctgatttatccttgtagatcaagctcaaagcatgagcccaccctcccatgaaacagctaagcatggctctcccttctctggttgtcacagcactttgtggatgtatatcacaatgtactaaggtttgctagccctgcctctaggcttagccctggagtcctaaaaagcagcagaacttaacagcacaggctttgggggcaaacagagttggggtgaaacctcagtcatctcttactagcttgggaaagtaaattccctaagcccccttttttctcacttcaaaaaaagataatagagttgaaattagaaataagtgaaaaaattctaactaacactcagttaagactcaataaaatggcaactattattaaaactatttagacctcatgtgcctagtactctgccaaaaaaaaaaaagcttaattacatgaatggatttaactttcagctggttcagtgtcataaaaagcatattcaagtatgatgccacattgtaaattcccatttatgcaaagtaagcaaaggaactactaatattcatattcacattttaccaatggcaaaatacacactgacaacgtaagtaactgtgttcagaacacacagtgaatccgtggcccaagtaagactagaactcagcctttgagtgttatttccgtgtaaaacattgtctcacatttcaaaaatgagtccatctaaaaatgatatagctgtccaatcctttgtactatgctgtgtagttttcctaaatatgcttattttacaagaaaagaaagttcgtaaaataacaaattggtaagatgccagaagaaggactggctcctcaatttagagcagagccttgcaaatgaggatgaacatttgaaagagcgatcttctggaaagcataactcagattacatcattttcttgcttctaagccctccagtgacttctccttgctctccaaataaaatcacccatcttttcatggcctccaagcctccatatggtctggatcctgcctaactctcataccactgttgtctgtttcagtcatcatactcaggttgcactggtcttctgtttctcatactctccacattcattactgctccagggcctttgcatttactattttctctccaggaagtcctcattccctaaattttcttcatttttggttttttttttttttttgctttttaggttgtcctgtcaagaatacttctccatctaatatatttgtttaccacccactctctatatccttaacttgtcctaatctctccataccatttatcaacatataaaattctcatttgctttgtgggttcttcctcccacagattattattagaaaagagagaaatcttgatcttgctcacttctttatgaccaacacatgaaacagtgattgatacatagtagatattcagtaaacatttgctaaatgaagaaataagcttcttttatcaccactaaagcaccaagataagtctttccgtgcctttgtcatctagatttatataacctccttaaaactaaaagcaatgcagtccccaaatttagaacttgtaggaagaagtgagcaaattgcaaacatcattcttacatccttgagaaaaaaagacttttgtttttctttatatttaaggaaagctgagtcttttggcaaaagggactgtttggagacactccctccatgtgaaccaaaaggttacacatgcttcttctccagtttggagctcagccccctgttctggtttcaatctggagatttcatctgacagcctgcatatcactacctatggtggacttgctctgtggccagagtttacttcttcttcttcttcttttttttgagatggagtcttgctctgtcgcccaggctggagtgcagtggcatgatctcgactcactgcaacctccacctcccaggttcactccattctcctgcctcagcctcctgagtagctgggactacaggcgcccaccacaaggcccgcctaattttttttatttttgatagagacggggtttcaccatgttagccaggatggtcttgatctcctgacctcgtgatctgccctcctcggcctctcaaattgctgggattacaggcgtgagccactgcacctggcccagagtttacttagacggcacaccacataacgagcagaacgtgcactgagatgggaagaacagattttccaagtagtttaatttcgagaattaacttaaaaattatctggtaacctcattcctaatgtcatagtgccacgtccactttaaagtttaaaatcttggaaatggattcaatcatccatgacaaacatatgttgttcttctcaagcagaagtataaaataattcttctccctaactttctgaattttccttttaataacttgaaaaaataacagcccttagtagcccacctgtgtgttaacagtgatttttgcaaaacatagccaaacagaagtccctgtttgcctcatttcaagttaatttgaaaaagaaaagttggctcaaccaaacttatgctgtaatggtccttgcttacaagtcagcaagtaccatctgaaagcttaggggtagcactccatttccctcctggatccctggtagtagatgtgcatgcaaagtgaatgcaggtacaaacaccaagtgctctcccaacaggtttccactgtcatcttcttcacttataagcagctaagccacaaattcccctctatcagatgtcacaggaagctacacaaagtaggatttgaaatgtatatatgtaattatgtcaaatctgatggcaacataatttactgaagagcagaaagcttattgaacatgaggctatttctattccaaaagcctagaacatagagtcagtctcatcctcccaacccagccttaaaaatcagatggagattcatgacatggaaagaatcacagggaagatgttcacattggtagtgagtttgcctcaatttgtgttcctcatgaccatctctagttttcaggccaataagggcagatactgctggtagagcagccatgttatatgatttccaatttgtgagttagctctttggctccctagggtaccttcaatagctatagaattagcatctattgcttttcatttggttcttatcatcacagaagagggttggccatacatagaatagttgagttttgggggaaagcattgggtaagaggaagggagtatgcactagaaaaagtagactcatgacacacactgtggtagagtggtaatttttgaaacgggctttaacagagatagaaagaaaactgtatgaaaactcttcataataattaattaagcctctcttagtcctaaattgagaaaaatgcaagaatcaatacttttttttttttttttgagatggggctgaagtgcagtggtgcaatctcggctcactgtaacctctgcctcctgggttcaaatgattcttccacctcagcctcctgagtagctgggattacaggtgcccaccaccacacctggctaattttttgtgtgtgtttttagtagagacagggcttcaccatgttggccaggcttgtcttgaactcctggcctcaagtgatccacccgccttagcctccccaaagttctgggattacaggcgtgagccaccgcacccagccaaaaatcaataattttaaatgtttcatacttattgacattaatgaaacctcctgaaaaagcatttaatgcaactccgctgatattttaaatttacgttcctcacattacaaggtcaggtcagttcccctgggtttcacagagccgacgttatcacatagacacgactttgttcatgctgtgtatggaacaacccttcagagggttgctgagctgtccatggtgctgggaaagcagctgtttctcctctttggttcagcaggagacacacattcagaaatgatgtgttatctcacagtgcagtggcccacacttccatgtttatttggaaaaagaaaacacatagtatctcctagtattctgctttcctaacaagctttgatttgtttaggctacctcaataaagtatctctttttactcttttacccttcagatattaacaaccacattgaggtacatgaatttgcacttgcttgcatttctatcattgcacttgcttgcatttctatttgtatcataagtgttttttctttccaaacagactataagtgtaagggttaaagaaatacttatggatggattgaaataactgaattcaaatttaggctcctccacctattagctgataacctggttgagtcaagttactttttctgcctcagtttctttaactgtaaaaagaggtgattgaaagccactaactttttggaagtgctgtagtttaaagtatgcagtgctatattttaaagtattttgcaaactgtgacatgctatgacagtgtgctatgacatgctatgaaagcaagcatttatcatgccactttttttgttgttggtatcacatgtagtaagatattcttgacagagcattaatagcattaataattgaagtttttgttgtctcctccaattcagaacaggcctatgggaatgaaggatccatctcatgccaggggaatcttatgagttatagatataagaagaatttcacttgaaagaaagtagagaagtgtagaagctgtaaaatttatatccggtaaataattcaaagattaatacccaaagtctcagtcatctctaggctcatcatcattgccacttcctcggtacttggcatttcttttttaaaaatgccccagtcatgatttaatctgaacacattctctttaaatgatctaggaataattaaatatcctgcccaacataataaagggtggcagagacaaaacttgacatcggattattctgaattcaaattctcaaccatcatgcctacagccttctaaatctaaatgagtcttctaggtataggttaaattaggagctggccaaaacttcttggatcccttattctgaagtagaaccttagagagcctaagtctagcattttagagaccaccctgaaaataagcttttttaggaggagggggataagggaaaatttgctttgtgaatctaacccaagataatcttcagtttccatgatgtaacaaaccagaggttgcacaagctgctggaatcacaagaacactaacttaccacctaccaatttaccaagtcagtatccatgaaccaactagaacttactttttgtgcagcataaagaaattcaattaaaatgcattctggtggcgttttcaaaactcagcaactttaataattacaccatttaaaaattgcatttagtgccattacttctcatccatttaaatcctccccattcttaaagatccagttgatattcccctccctccaagaacattcacagatggctccaacttacagtaatttaatctttctctgcatacatatcacttctgcctacaccatacatctgtcaacaaatcatctattgccctggaatatctgttttttaccttgctatctaacttatattaattggcttttcgaatctataccttatgttttcaaccttactggaacactagctcatcacaggtgctcaataaatatttgaactaaagttagcacttacattttattgaaactgcttaagtttctgcttcttccccattcttttcccccattttaagtccacaaaggtatggctactttttctgtcataatcaataccgtatccttgggaccaaggatatcataggggcttatgtgcatgcttggaataactacagtaataaaaatatgacctagctgaattgccagggaattaggagaaattttcaaatctctagttcaaggagataagctatgctcctaagtgaatttattttatttcagatgagaatcactttcaaagtaccattgggagatttgtgtttgtaaattctgttctcagctacaacaaaaaatgtagcacagaccatagatcaaggcatagagtaaggtaaaatacaatacgaataaaagggaaagagcacccagaacacatcggttattttcaaaatgtcttatgtaaagactgaggcattatgcttcagcacagagctgagaagaaatttgcatgaaccctttcaagagcttgcaagctgccttaactccatttatttatgtatttttcaggaatgtttattgtggtagatgttagggatagagaagtgaacaaaaccaatatagtcttgccctcatagaatccacattctaacaaaatgagaaaataaaggaaatttctcccattcatttatataataagtattgataaagtatcgactccatgcacagcattgggtttcactttcctggctttgctgctctgatattactgagggtagaagagatgacacaagcagttaatctgatttaataaatcctttaattctgtcggtaaatactgggaaggaaaggggatcatggagaaagagggcccagaaatagacattaagccctttttctgtcgtcttcctacactttagtaatattaagacagttccttgagaaagagagcaatctctgccttgctcaggggaaaaagaattgggagtctccatggcctagttgaagagagagagagagagagagagagacagagacagagacagagacagacaatcatgtacgctttctttcatggtggcgtcctggctgctgcaatagttgcaactcaaggaggttaggagcagccccctcctgcatgatcatgcattatcccatgaattctaccatccataatgcacattctctagttgaaggttttattttcccttttctttgttgtaatggaattttctattataccctaaaatattacttttactttttttaaaaaaaaaaaagacattctcttgctgtttcacatatagttcttagattaatactcagatccatttaacatcataaaagagaaacttctgtatcaatgaccaaatcagtgggtgagatctacaaactagaatcagggctggtgcattgctttcagaatgttccttatttatagacagcttaattgcattaagtgccaaagaatgtactgctttctttgtaatgagtttttatggtcttagtgttcagaagctcagattccatctgtgacagcagaatgttgtagaattcagctattaatagctgctggtacacacttactcagagctaagaggcccaaggctgtagagacagccagatggagataataccagagagtgactgtatggacaaaaaggatgatctttttccccccaacacaaaacagacaacactaaaaacatgacaatcctgttttattgcaagccaaactctctgaagaatttttttccccctctttggaattcttaggtctggttctaaatcacatttgatttatcactgtttctgatgttcaaataactccttacacaggttataaaaccaaaaacatccagatgagttaacaaccattatttagtaaaatgataccaagtaaccacacagaaaatcaggaataatacaatttggctattattcaaggaaaaataaactttgatacaggacagccttccgaatcaggaatattttccttaacatagagaagaacgggtaagtgagctgaataatacagacctttttatggaaagaaaaaattttttaaaaaaacctgcttaatgtgatttagagtgattatggctttagttcatctttattctaataagagtaagaaaattatactgcaagacaagggtgacatgaccaccatatttaatgtcattacattaatgaatgattcttatgggccaaagaacaccaactcttgttttttaaaaaattataatatcctgctaagtaaataagaaaaaaacctattttttaatctgtgactcattggtaaattgaatggctaaattatattttggtgggagtacaattgtaggttgccaaagaaatgtgggttatatgcttaagcatagaaatattaatgggcatgcttgtgtgcaatgaaaaatgatattaaaaaatgggtaagtgttcagcatattttgtttcatttgcaacatgagtaaaatcacattgttcttctgaagccaagcacagctaaaggcaagaggcacagataaggtggggctgtgatggggagcactctgctgtcatgctttaaggaagtttctggcaaacagagaatgtatgttaagtacctgcagtggcctatttcatagagacaccatataaagagtcctgcaaagcaaaactgacttatgtaaaagaggcgcaggttaaggtttcatacaggtgggtaagaaaaccaggatgtctcaaactatccaaagaatctaaagtctatccctacagacctccattttttcacgtaactacccctactttgtaggaaggacttttttttaagtaaaaaacaggcctaaaattttgataatctattttcattgcaggcaaattggctagtagtttaggttctagagtcacactcattgtgtttcatgtttgcctcttactagttgtgtaaacctgggcaagcttttgaagttggtaagcctgtattttctcagaggtaaaatagatattgtgagaatacctacatcataggattgtgaggattatgtaagatattctatgcaaaacatatagtacaatggctagtatacagtcaatgctcaatagatgtttcttttttattcttatttttgttatttatttacattttacttcattactgctatatgtaaagtgcttctaatattagagacatctgggtttgacttctggctgagaaaccatgatgaatcttcttcagtttactcatctgtcaaataaggctaatcatagatatgccataggaatgtgataagtaaactaaataatttaagccacacgtttaacacagtatctgacacaagctaatgcctataaaaaactagctgttaggatttcaatcgtagtcatatccactcaataaggttaatgtgacacttaaatgtgataatgtatataaagcccaaccaacagtacccgaaccttaaatgttacctcactcttcctgcatcttggttagccacctgcatgtatcacatagtatttttaaccaatagtatcttctgtatattggctttttttttttttgagatggagtctcactctgtcgcccaggctggagtatagtggcatgatcttggctcactgcaatccccgactcccgggttcaaacattcttggctaatttttgtatttttagtacagatgggattcaccatgttggctaggctggtcttgagctcctgacctcaagtgatccacccaccttggcctcccaaagtgctaggattgcaggtgtgagccattgcatccaacctctatatcagctttaatatttaccagtctccaagttcattaggtgacttgctaccatactatcatttcacaaagcgattgtggtacaattatgtactgcataacaatgtttcagtttatgatgaaccaatgtgtgatggtggtcccatgagattttaacagggctaaaaatattcctattgcctagtgatgttgcagccatcataatgccagagtgcaatgcattactcaggtgtttgtggtgatggtggtataaacaaacctactctgctgtcagttgtataaaagtagagcacataccgttatgtacagtatgtgatactcaatcatgataataaatgactatgttactcgttatgtatactatactttttatcattatttcagagtgtactccttctgcttataaaaaaaaagttaacctttattaaaaagtctctgggttgctgagcacagtggctcatgcctgtaatctcagcactttgggaggctgagacaggtggattacctaaggtaagaagtttgagaccagcctgggcaacatggcgaaaccccatctctactaaaaatacaaaaattagccgagtgtggtggcaggtgcctgtaagcccagctactcgggaggctgaggcaggagaatcacttgaacccggaagactgaggttgcagtgagccgagattgcggcactgcactccagcctgggggatagaatgagactccatctctcaaaaaaaaaaaaaaaaaaaaaaaaagcctctgggttgataggtacagcaaaccactatggcacacatttacctatgtaacaaacctgcacatcctgcacatgtacctcggaacttaaaataaaaaatttaaaaaagcatcaggttagccaggcgtggtggcacatgcctgtaatcccagctactcaggaggctgaggcaggagaatccttgaacctgggaggcggaggctgcagtgagccgagattgtgccagcttgggtgacactccagcttgggtgacagagtgagacttcgtctttgacaaaagaataagcctcaggcaagtccttcaggaggtattccagaggaaggcattgttattttaggtgatgacagctccatgcatcttattgcctttgaaggccttccagtgggacaacatgtggaggtggaagacagtgacattgataatcctgaccctgtgtaggcctaaggtaacatgtgttcttttgtttcttaaggtttaacaaacaagtttaaaaagtaaaacattaatgggaaagagcttatagaacaaggatatacagaaagataaaaattttgcatagttgtgtgtttgtgttttaagctaaatgttattacaaaacagtcaaaaagttaaaaaaattaaaaagtttataaagtaaaagttatagtcagctaagcttaacttattattgaagaaagacttttaaaaaataaatttagcatagcctaggtttacagtgtttatagcagtgtacaataatgtccttggccttcacattcactcactagtcagtgactcacccagaacaactttcagtcctgaaagctccattcatggtaagtgccctacacaagtaagtgtgccatttttaatctttttttttttttttttttttttttttttgagacagagtttcactcttattgcctgggctggagtgcagtgaagcgatgttggctcaccgcaacctccgcctcctgggttcaagtgattctcctgcctcagcctcccaagtagctgagattacaggtgcctgccaccacacccagctagtttttttgtatttttagtagagacagagtttcatattggccaggctggtcttgaactcctgaccttaggagatccacctgcctcggcctcccaaaatgctgggattacaggcatgagccactgtgcccggccatttttaatcatttatatcatatttttactatgctttttctatgttgagatacacaaatgcttaccattgtgttatgattgcctacactattcagaagagtaacatgctgtacaggtttatagtccaggagcaatagcctataccatatagcctaggtgtgcagtaggctataccaccccaggtttgtgtaagtacactctggtgttcacacaaggatgaaattgcctaatggcacacttctcagaacatatccctatcattaactgacgcatgactgtgtgtatattaatatcacaagccctttgcaaactagatagggaaggtatttcattctcattttcatgctttagttaatatcagagagccaccaacttaaaatatttccacatacttccagctgaaacttcacaggctgctttcattttttacttagtttctaacattatgatttctgaaatttccacattagctcatcacttcaaaatgcctttaatgccaatatatcaagcccatcatcaaacagatcatcttacatatttgtgcagtgtgtgaggctctaagtgaacactttctacaaagggaatttttatctacatccccaagtagaagagagattgtgctgtgctcctttccttctcatggaaggtttactaataatttcattgtcatctttaagcctttcactagtcacagcaagagtacatgcaaggatctaagcaaacaaagctcttaggctgccttgaaacaaaacctgtctgtaccatcatactaaattcccccagcctatttcaacactggcaatgaaaacatggcatttttcaccttgactttactttcaatgtgacaaggcagtgtctaacttcagggcattccgtggttatgaaatcttgacacctcacctactgtgggaatgacatgttgaaacagtttctccattctctgaggcattttcatattaagctctggtgaatgggtattaatgagatggtcattggagtgtcaggcgggccgtgtctcttctttttctgtctctctccccctgcccttccccatcccatcctcctcccccacccccagctgcacagctgacaacttcaaacatttaattactgatcccctcatcccctaacaatcaatagttggcatcccccaaaatcaaataatattcaatgtgcagagctgtatttgttttcacataacactgcagggaaattaaagataactcatcatgtgaatcaggttctctctttatgattaagaagtgactgccacttccatgcacatcctaggggttacctaacgtggctctaaaatgtccttggcaaatgttcttactgcttctccaattacattaaactatggattgtctaatgattctttggaaaaatatacttttatgataccttgaatgctaaaaaggattcttgttatttatgataaattacttatcttttaacaatagaaatagtaacatgtattgagggcatacaccatactagacaaggtcctaggtgctttatatacataatccatttcattctcatagtaagtccatggaggtaagtaccattattatttctcatgttttatgtagaggagaacaatgacattctgatagaatgggtgacttgactaaagttacaactagttagtggcagaactggaatttagaattgttctgtctgaaccaagaatcaaaagtcttaaacactcctttacactgcctttcttggcaagttgaattatatcaaatgacttttgttttggtttagctataaatatttcacttgtctcaactcatctagcacctttgtcattcaggttcagttatcaaggatcacaactctgattggtgctctgagtgataatgactacatttcccatatgaaaagtcatacatctttattatttttatgaaagttcagagtccttggattgtgttttgttgtttttttctttaagtttaggttctgggagtacacatgcaggtttgttacatgagtaaattgtgtgtgttgagacttgtcacccaagtagtgaggatagtacccactatgtagccttccaatccatgccctctttccatccttccccttcaagcagtcctcagtgtctatttttcccctcttttgtttccatgagtattcaatgtttagctccacttataagtaagaacatgcagtatttggttttctgttcctgcattagttggcttaggataatggcctctagctgcatccacattgccacaaaggacatgatttcattctttttttatggctgtattatattccagagtataaatgtaccacattttgttagtccagtccaccactgatgggcacctagattgattctgggtctttgctattatgaatagtcctgtgatgaacaaacaggtgcatggattgtgtgttaaaggtggatttcagaaatcataatgaaaaataatctcgaagatttatgaggatctattttttcacttgtagttatactgtagcagaaaaattttgatgacttaataataattcaatttaataataaacaatgtattatattgttttttcacttatattttgagggaaaatattaaaatatttcctcaaaaatacatcaagaaacatactgaaattatgaaatatggccaagttaaatcagaaatttcagggagtgttttgatttcccaatccaccactttatgaggaagcatagagcccacttcagcaggtcagttgacctgggccccaccctcatgaagcatgttgagttctagcaaacatgtacatctttggtttgtcacctgtccatactgaacttggggcggaaagatcactgcttcacacccctccttttcctcaggtttgccagtctcagagaattagaacactgcataaaaccttagaactcagtgtattccagctctcacagtctactgatgaagaaactgaagccaagaaaggtagccacagtgcctgggccagacagacccaggttccagagccagcccaaccatctcccactatcccacgcttcctctccagcttacactgtactgtacagatatcggtaaaggagtcatcatttgtaaataaggctggcaatgttccctcctcctaatgttgttaaccagaaactactttattgtaaagaaaacagatgctactaattctgcatcaaagacatcttggacattatgctaattagagcctaatgaagtgggttggcatcccagttccaccgatttaagctatgggaccaattatgaaactttccaaagcctgagttccattatttgtaagaaggtgatgataacaccaccaaccgcattgggttgttggtgatatatatatgtaataattcatatatctgacacataataaatattcaataaatattactttatcttatcattttgctaaattgtaacagaaaattccctataaggtcttcagagtaattctgcctactatgccctccccatgcagctgccaacaaatttattatagttggtatgtcactggttacgttttccaatgtttgaaaaaaattctacctcactccccatccttaccacacatatatcccccacctacttggagtataaactcctgggaaaccacttacaatgtacagtttggctgtggctcaccacactcttctcaaggctcttcagtattgggatggatggcaagaattgcatttattttctcacttcttttgtttaaggtgctgagtcagattaagagatggcactgtcccaaattgcaacgaactggactccacttgtattttgtaaagttgagctgacccggctcagctcctaaaagagtgctgtttgcctgcttttccgggatgaatactttagcaactgctgctctctgtgtctggactcacctttcagagagacagagactttgaggttctgtggctttgcctaatgaataacctggtctctgtcattttcaaaatgcaaacatttgtgggactctgagaactgttctttgtagaaacaagtcattgccaaagttcagagagatagctacagacacagatgtagtcttaggacatattgattagctttctggctagatcttttttaatgtaatgggcatactatcttggtgaaagaagttgactttttgacaatttgcagccatggaacttgccttctgcatcaaaatcattggaagattatgttcctctgaagttcctaatacctcagaaaacagctcctgtccatccattcatttcttcattcaacaaatatgtattgaacacttggttttaggtgctacgccaacaactagcagcaccaataatagtgataaatagtatcctggaagagtttaaaatttagaaggaaaaataatccacaagtacagacagttatgacttagggtgatttgatttaggatttttcaactttacgatgatgcaaaagtgatacacattcagtagaaaatgtacttcgagtatccacacgatcattgttttttcactttcagtacagtattcaataagttacatgagctattcgaactttaaaaataggctttgcatgagatgattttgtagtagatgagttgtagtttaatgtaagttgttctgagcccatttaaagtaagctaggcttagttatgattttcagaagattacgtgtattaaatgcattttttgacttaagatattttcaacttaatgatgggtttatcaggatacaaacctgtggtaagttgaagagcatctgtatagtatgttagttgtatgggggtgggagaagaaagtgatgtggctataaggtggcacagtgaagtgctgggacagcactgttcaatagaaataaaatgtgagacacatatgtggtttaaaattttctagcagccacattaaaaagtaaaaaaaggtaaaattaattttaataatacattttctcaaactcaagatatcgaaaataccatttccacatgtaatcaatatcaaaacattattgttgagatattttatatatttttttgtactaagtcttctaaatctggtgtgtattttacactttcagcatatctcaaatgaaatagcaacatttcacatgcacaagactcacatatcttctgatggctatcttgtcgaatagcacaattctaggaagttcaaaagggggaacaattgcttctcaaattgatgaaggtagagaagaatggtatcagagaaactgattaagcagggacctgggaatctgagttgagttccggggcatgtttgttccctagcaccatgacctacatggcagtgtctcttctcatactattttaagagtccctggtaagtaggttctgtgttcatattcctaacagtgagccccctatgcccctgtcctatggcgttaaagaaatctttatatgttgaatgaataaatgaaagaagaatttaaaaaatagttatctacagcttggtagaccctgtgttggtatttgcatatagtctctaatacttatattgtgacaaactttcaaggagctactaacatcaccattttataagagagaaatgtgaaatacagggtggttaggggatttcccaaggttacagacttagaaggaaggaagggaggccgggctcacacctgtaatgccagcactttgggaggccaaggtgggtagatctcttgaggtcaggagttcaagaccagcctggccaacatggtggatccctgtctctactaaaaatacaaaattagctgggcatgatggtgggtgcctgtaatcccagttacttcggaggctgaggcaggagaatcacttgaacctgggaggcggagattgcactgagctaagattgtgccactgcactcctgcccagaggacaaagtgagcctccatctcaaaaaaaaaaaaaagaaaaaaaagaaggaagggagagaagaatgggacagagttacataatgggaaggaaagcatacaaaaagaggaatgaggatagactagacagaagagtgagctacacaagtgagttaagaaagtgatatgctaacacattaatgattaataggtacgaatttgtccatcaaatcttaaatagttcctcatatattataccttggacctctcttctgtttcttctgacaaggttttcttgaaataagaaacaaaaacaaatgactgccttcccaaggcaaagggtattttgggaaatctgaagcagcgttagaggtttagcccagtcttcctcactacagcctcttcaacatttctgaaaagtgaatgtccatcctccctgtgagaaaaccatctcccaagacagtccctgccactctttgataggctgaacactagaaaattcgtccacatactgatttccaaccttcccttcttataacttccaattagaagcttgttctaattgtgccttcctaaatactcttcttcattcagatatcatgtgcctacctagtctattcgatcttgtgggggaggcaggaaggcaaacattacttatgcaatactcaagtcaaatacatatggattcaaactgagtcctaaaatgtatatgtggccgggtgcagtggctcctacctgtaaccccagcacttacggaggctgaagtaggcagatcacctgaggtcaggagtttgagaccagcctgggcaacgtggtgaaaccttgtctttactaaaaatacaaaattagccgggcatggtggcatgtgcctgtaatcccagctactcgggaggctggggcaggagaatcgcttgagcctgggagatggaggttgcagtgagctgagattgcgccattgtactccagcctgggtgatgagcgaaatcccatctcaaaaatatagtaaaatgtatatgcaatttccaaaaaattaaaaatcatgtttttgtgtcatctgggaggtaagtataagaaccagggcttggccctataaaatttaatattatctcatttttacttaagaaatggacttgctaaatctgctgaccatcccaaaaaatcatcagcaacttggagagtcagctttacattacaaacaagtctgaaaactggaatgataaaaaccatgatgaagttctaacttgctgacttcttggctgtgtttggacagccacaacttccctgcctttctaaaggggcagagaatagaatgcgaaatgtcaccatttctacaattttattcatccttctttccaaacatttatttttacttccttagggtatgaggaagagcatgttctaacacaattgttctgagttgttgccaggaagtcaagtgtatctttagcatcacctctgggcaaatagtacaaacagaggaaaatgatgtttgaggccaaatgttgaaaacttgagacttgtgtagctgagctaaaagagcagagagctaaaatgaaaagttaattatgttgattctgtttttttctatgagaatttctatttaaaggagcagcagtagtgaaaacaggatgggctttaagtaccaacagctttgggttcaaatgcaggcttgtcaattgctgcctgattgagttcccttgaatatacataacaaacatttaattgagtgactcctctgtgccaggcacgttgtccttacagagcttaaagtccaagtaagttaattaccccttggaatctttttttttacatcgaaaagaaaatataatactatatgcagggctcttataattaaatgaaatgacatatctaaagttataaagcccagtgcctagcatatagtagttgcttaataaatcttagtttcttttccttgtcttcagaataaccaaattaatctctcctttgagtcaaactgtgatttaaaagcacagccctagtacatcactaaaaataaaatcaacagacagttccacacatctagacactcctaaaatacccaaaggggtttggaggtccatcagctgtgacaggcagacttcaaaaaatcagactcagatactgccccattcaaatagttctattttgactccaatttgtttttatacaaaacaaaaataaactgcttttcattttaattaccagccagcaagtatagtatatgtagcatagaaatcaaagatataaatgatgctgcagtatcagaactgctcattctaaaacaatctattcattgtctgtaatgtgtgagacattgtgatggtattagactaataaaagaaacaaacacgtccttaatctgatagagcttactctgtaggaagggagatatacatctacctttagggaggctaaacaaagagatgaaacaagacaaatatgtattaaacattagtggccaatatgctgtattacaagcattaaattttgaactagagtctctaatgtagggattcaggagaggtaacaaagtcaaggagactttttgggaaaaaagtggaatttgagcctagacacttgaagcttatggaggattattcaatgccttctattattcctgtgcataaagatcaaatgcaccaaaactcaaagcagaagccagctataataatgccttctctttctgaatgcatgtagttctgcatgaactgcttcattattcactagtacaaattttacttgggtcccatctcatccaaaaggcagcattaactactcttgggtaaaaggtcattggtttttatatctttgtagagtttttaaagacgctgttcagtccaactagcttccactgcctcacatacacacaaaagaaagcaaagagaaataaaggaagagagggagaaaatgcactatttgcattttctgattgtgaaaattcctcattcctacctcccaaacttccctatgggcaagacgtaatcacaacccagacagtggatgcttcccctcttactacccagaaatgggagataaagaaaatgtggcacatatataccatggaatactatgcaaccattaaaaaggatgagttcatgtcctttgcagggacatagatgaagctggaaaccatcattctcagcaaactaacacaagaacagaaaaccaaacaccgcatgttctcacttataagtgggagttgaacaatgagaacacatgaacacaggaggggaacaatacacaccagggcctgttgggggttggggagctaggggagggatagcattaggagaaatacctaatatagatgacgggttgatgggtgcagcaaaccaccatggcacatgtatacctatgtaacaaacctgcacgttctgcacatgtatcccagaatttaaagtataatgaaaatataaagaaaaaagagatttgatatcagaaatcttttaaaattttaaattgtacttagactgggcaaacttcagaggtgagtactctgagacagggattcatccatactccctagccacatcactgtgaagccaaaacaaccacattccattcttggcatggaatacaacatcctccccttaaagtactgcacatttatcttcagctaagttgtgtacatttgttcactccaacctttaccttcttccatctgaagtgcttgatcagccactgaggaatcgacttcatgggaattcatagtccaaaattatatggcctgctgtacatttacagctttcttcaaattctccccgctatggagaggagccagagctttaatcaaattccttcccacccccacacatccccaaaagtataagagcctatattctaaatctaccacagtcaacttgctatttatttcatttccaaataaccatactctaaccataattcaagaaaaaggaaaaaaaaaagacatacttcaaaaaaatacctccatgcccttttttttttttttttttaaagttcagggttacatgtgcaggatgtgcaagttttttacatagaaaaacatgtgccgtgggggtttgttacatagattatttcatcacccaggtattaagcttggtatccattcattatttttcctggtcatctaattttacctctcctcctctggtaggccccagtgtgtgttgttcctctctatgtatccgtgtgttctcatcatttagctcccacttataagtgagaacatgccatatttggttttctgttcctgcatcagtttgctagggataacggcctccttatctgctaataacaactaaatactgttagaaggtttgtctctgacagtctcagttagtaaattatattaaaataattttgaaatgcagttttttttctgttctaatactttaaaattggctgggcgcggtggctcacgcctgtaatcccagaactttgggaggccgaggcgggtggatcacctcaggtcaggattttgagactagcctgaccaacatggagaaaccccatctctactaaaaatacaaaattagctggcgtgatggcgcatgcctgtaatcccagctcctcggaaggccgaggcaggagaatctcttgaacctgggaggcggaggttgcggtgagcccagatcgtgccattgcactccagcctgggcaatgagggcgaaactctgcctcaaaaaaactttaaaattatccagatgccagaatcagtgaataatgatcaatttgggtcttgattacatctttttttcagtatctaatgacactttgtgagtatcattgtagcctactgagcactatacaaggtgaagtacataaatccagacttggaagcttacaatcaaattgctttaccaataatgtataatataaaacaactccaccctctctttaccctgcagtgatagagtagataaggtttcaaatagccccaaagggaacttattcccaatgagcttagatcttattttatacattgctaaaataggggatttgtaacagattaatgtaggattagaatagtcacaggtgttctctcacaccagagaaaaaagtacaaattagatgatatcatctcactgtctattttggccacaaactaacccttcacttctcaaaccctcagtttattcttctataacttgggaatggttctacttgcttcttctatcttacagagttatcatgaccctgagataatgatttcaaaaatatactgaaaatgatggtttccaatttcatccatgtccctacaaaggacatgaactcatcattttttatggctgcatagtattccatggtgtatatgtgccacattttcttaatccagtctatcattgttggacatttgggttggttccaagtctttgttattgtgaatagtgccgcaataaacatacgtgtgcatgtgtctttatagcagcatgatttatagtcctttgtgtatatacccagtaatgggatggctgggtcaaatggtatttctagttctagatccctgaggaatcgccacactgacttccacaatggttgaactagtttacagtcccaccaacagtgtaaaatcattctcagtaaactatcgcaagaacaaaaaaccaaacaccgcatattctcactcataggtgggaattgaacaatgagatcacatggacacaggaaggggaatatcacactctggggactgtggtggggtcgggggaggggggcgggatagcattgggagatatacctaatgctagatgacacgttagtgggtgcagcgcaccagcatggcacatgtatacatatgtaactaacctgcacaatgtgcacatgtaccctaaaacttagagtataataaaaaaaaaaaaacattaaaaaaaaatatatactgaaacatccaaaatgccagacaaataaaaggctgtcttctctcctagcttccttggattcttgctctttctccacctacacaaactgttggcaggaccctcagcaagatgtcatcatgcacctgtgagcattcatttcaagaacagccaaccatttatctggaaaatcagaaaccacagatagggcagaagacctgcatgcccggatccattctgtgcaatttagttttttgaaaacaaatttaagattccatgcagaaagcaccctgaacactgaaagtatgcacttcctttacaaagagcagctcaacaaagccagctgggtttagcaaccccatttctttctttctttccagcactttgcatctatagatcaatatgttgtcattccagaactttcactaccttattctatctttctctcaataacctgtgaggttgcagaactttcttccaactttcacttattgcatttttacctttagcctacacagtgacctgaggtcaaggcagtcttcctaatcaagaagccccttcccctaaagctctgtagatttcagagcccttagaataacattccaactccattccacggcttacaaagtccatgagatcccacttttggccacttcttcatctcacaccactttctccttccctcaccagctttcagccatgttcactttttgattctttgcatatgcgacaagcctcagggctcttggacatgctgtttcttctacttgattagctttcccaccaattcttgtatggctggctcattgtcattctttatctcccagcttatgtcatctcaactgaaatcatctaaagccatctcatcattatccagtatctcaacctctcttttgttttcatcatagcataatttatgactatttcttttcttttccttttcttttttttgtttttttttgagatggagtctcactctgttgcccaggctggagtgcagtggcacactcttggctcactgcaagctccgcctcccaggttcatgcctggctaaatttttttttgcacttttagtagagacggggtttcaccgtgttagccaggatggtcttgatctcctgacctcgtgatccgcccgcctcggcctcctaaagtgttgggattacaggcgtgagccaccacacctggccaatttatgactatttcattttctgttttattcatgtctcctccataaaggtgtaagctgaagaacagacactgtgcgtggtcagctcatgattagagctccagtgtgtgaaccatcactcatgctaacatagttgatgctccatgaccatacagtgagtgcgtgaaaaatatacatggagtgaaataggcaatttgagtatgtacactaaattctgtttcccatgtgcatgtactagaataggaatgttgattaacttgttttgaaaaagaattcctccagcaagtgtaaatctaaactatttttgactaactttgggagctccagacctgtactgtgcaacacagtagccactaaccacgggccactattgctcacttgaaatgacaccagtctgaattcaatgtgctgtaagagtaaaatatacactgagttctgaagacaacatgagaaaaagaatgtaacatctcataattgtcattttgattacatattaaaataatatttttgatacattggattaaaatattaaaattaattttatctggccaggtgcagtggctcacgcctgtaaacccagcactttgggaggctgaggtgagtggactgcttgagcccaggagttcgtgaccagcctgggcaacaaggcaaaacccgtctctacaagaaatacaaaaattagctgggcatggtggtgtgcacctgtaatcctagctactcaggaggctgaggcaggagagtcacttgaacctgggaggcagaggttgcagtgagccaagattgcgccaccacactccagcctgggcgacagagtgagactccatttcaaaaaataataatagtaaaagtcaggcacagtggctcacgcctgtaatcccagcactttgggaggccgagacgggtggatcatgaggtcaggagtttgagaccagcctgaccaacatggtgaaaccccgtctctactaaaaatacaaaaatcagctgggcatggtggcacgtgcctgcaaccccagctactcaggaggctgaggcaggagaatcgcttgaacctgggaggtggaggttgcagtgagcctagatcttgccactgcactcgagcctgggcaacagagagagactctgtctcaaaaaaaaaaattaattttatctgtattctttattttttttaaaagtagctactaaaaaattaaaattacatatgtggcttatgttagatctcttggaatgatgctggtctagaatattcctctattctctcatcatttcagagttaatctgattttaatgcttatgactttttcttaaacctgcctataatggtatatattgagagtgaaaaatatttagaagtctcaaagccactgccttaaattcttatgttattctacagtattcttatctcatgcagatcttagaacattgttcaagtatcataaactataatacatcagactatgggtgggaaaacatcttcatataattttagaatcattatttacactactgttcaaatcctttaattctacttccagagctactaccatcatctaggccaccgtaatctctcaactgatctgtatgactgaagtaacttcctaactggtcttctacctctatctcattgttttccaacaatagacagtgtaaaagtcttacatgctgccttcttgcttgacctgcctgtagttgtccactaaccccaggataaagttcaaatcttcaattcagcctttaattcctgacataatagacttacttcctcctcttgcctacttcctcctcctcttaggctcctcacaccagtcattctgaactccactgttctgtaaaggtgccatgcttcttttggtttttggattttgctccttttacagaacccacatccattactctccttttatctggtcaacttctactctattctcagcttaaggttagaagcagcaggtgtgtctggtacataggtgcctgccttgcaagggaaagcatctcctggcctccaggaacccaccacagggcttgtgctctgttggtggtggatgtagaacacaagccacatgcccaaacctaggcgtgcactaagcactctccacaattctgccactgaatcctcaccacaaacctgtgagcagacagcagcagcagcatttaagtcctgtgtgccaagacttgtttcaagtactttaaatatattttctcaggcttcaggaaaactccctaaggtaggtatttactgttttcctattatattattctcttattatccaattcattgatggggaactaaagcccagatggatttagtaaatcacccagccccatagcaggggatacgagctcctgcggcttggcttggcagcctatgttgacttgtgcaggtgttatcaccattttagagatgaggaaacaaaagctcagcaagtttagggaattttcccaaagtcaccatatcaggatttaaaagacaagttagatgccacatcatgtttttcccaatagctgtccatactccgtcattttacctgcgttacagtcgcctaccaacttactggctccccctactagactgtatgtttcttattctttagttttttttatcttattaacagattttatttttaaaaatagatttagattgacagaaaaatggaacagatagtacagagagctcttctatacctcttgcaggatttctcctattgtgaatatcttatgttagtgtggtacgtttttataagtaatgaagcaatattggtatgtaatcattaaccaaagtccatagttcattcagatttgcttaattttctaatgtcctttttctactctaggatcctacccaggatagtacattacagttagttgtcatggctcctcaggctccttgaggctgtggcagtttctcagacttaccttacctttgatgatcttgacagttttgaggaatagcagtaaggtatactgtaggatgctcctccagtggaatttatttgatgtttttctcgtgattgaagaccacagagataaagtgccatttccatcctatcacatcaatcaaaggtacctatatcaacatgccttattttcatgttggacttgatcacctggctgaagaaatgtttgtcaggtttctccactgtaaagttactcccctctcctccaaactgtactctgcacccttagaaagaagtcatgatgtacagctcacccttaaggcttagggagctatgccaacttgctgtcttccttgagggtatgttatctgcacaatttatctggagttctgcatgggagattttctcctcctctcctatttattcaattatttacttataccagtatgaatttatgcatattgattttatactttgggatagaattcaatgctatattttattgctcggattgttccactttggccattaggagctcttccagttgatttcggtgtccttttgacatacctccatcagtgcaggcttttttccttttttttcagtacttctttactttctggttctataagaggctccagactcatatacttcctttgctactagtagcatcagacatttcttcaagaattcctggttccttttattaaagaatggttttagaaatcaagatctgggtgctagttgctactgggatgccatttcttttaggccctctcagctgacacagaaagaaatatatgtgtgcatataaccctatgtatatctacataaatatttctatatgtagtcacttgtgaatatataaagttaagcaggggttcttgttgatgtctctaactttaattcattaccacatgtagcattctaacatcctcctcttgcttatctgtaaattctcactccactagtgagaaatgactgtaagcttcttaaaggcagaattagtgctttaatcactgctgtatcccaagtatagtgcttggcacatataatgtacatgttgacttactgttgaatttactccataatctcaattctggaagggactacagataaatttgcaaatgttacaaaatacggatttcaaagactaaaatcacaacaatttattagggcaaacagtacaagagggtgcactaacaaaggtctgatttaagtgcttttattcaacccagtgaagggaaaatgacagtaatacatctaagccatgcaaaaaggattcaggcttccttgaaaaggattcaagtggcataaaatggtttgtttctccacagcaatttacatttattaaaatagataataggcataatcattgtcaaaatagagcttctaccctgtataatatcttaatacatcctcgaagttcctgacaaacaggcacaaagccatggcagattagagtctaagtggaggatcactccaatagcacagcagaaaaaccaatctcacacttctaggaaggaaaataagacctgagaacagcctttgaaggtggagggtaaagtacaaagggaaaggtgctaaagtgatgcatcagctggaagtataactgggctctaatgtgacactctgcattaacgatgctaatttatgtctgggtaagcgtgtgtgggtgacacagaggaatttgaagaggtctatattataccatgggggagctcatcttgaatcttttgccagggtacatgctttatgcagggactgcttcacgtgggcatatattatgtacattttgtgtcagtttcatctgagtaaatcacgtgtctctttagatctattctagaccctttccaatctattctttgcactgcagccagaatagtatttttgaaaagcaaacttggtcactttccccaatcttccctacatttaagcatttaaatggcttcctgttactcataagataaaaagcaaaaatggctcatatatttttgcaagactctgcaagatgtggcttctgtctaatgtccatcctgtgggaacttaagccacactggccacctttcactttttgaacacacactctctctactgctactaccataaagcccttgtacatgcagttctccctgcctgggtcatcttcccatctcctcttcaacagagctaactcttattatgactttcggatttagcaattattctttcaccagggaagccttccctgtctaggtccaataatcctcttattacacactctcagagtactactaactccttcagagtgcttgtcacggttgcaattgtacatttatctttattattctttattaatatatttccccagagggtcttgtcactccatattcctggtatctaaccccatagctggtatacaataagtgcccaataaacacctatcaagtaaatgtctgaaaaatgaccacgcaatctatccatactgctgtaaagactttctagaatattaaagtcctctttggattcagaagaatatgtcacttcacataataaatttgattggtcaccccaaggatgagtaaataaacatcactgccaggtttggtagtttccaaataaacatgaggtcctttttatcatatcgaaatgaatattattcaatattacatagaagtggacataagaggacatgaagaaacaatctcatgcagtaaaggttcacaatggtgccaatcatctcctaatcctgtccctcagagatctgtttattaagtaatttttctttatttcacaatatctcaaatgctactattgggctcaagctctcatcattggccttggatttcattcaacatttaacaaatatttactgagcatatttactagattccaggcactgtgttagagcctgggatacacactaggcaagagagacaggtgctcaccttcaagaagagaggataaccaacacacaaatgagtaaataaaatgattgctgattgctattagtgctaacaaggaaagagatcctgttccatgtgagtgagatcatgcccattgcttcatcatgattgtaagtgatccaaatgcctcactgggataacctgcatcattattgcttcgtggtaccaggtagatcacagtcttttctttttacttgatgaaggagtaaagaattttctgttttaatgccatggtttcctataagaatttaaatatactcactttctcaaattaaataagtgtaggcaaaacacaaggtataccttttctaaggagtcactataacacctcaaaatctctattgtcagctttgatgcaccccaaaagatcaaagtgccttgctctttaagatgcatatctcaacagagcagctgtttcatttcaagagagtcttcattttttttttagtgataagtttacaagcagttgttagtggtacagaaaatcttacgacatctgtggagaagttgtaaatttttcagattgggttaggattctcttgataatcattaaaatccttgaggtctaggatagcatttggagcataatttgacctcaattatgtgttaaatgtttgctgaagaaatggtgatgctttgagaaaattagctatttgaagcatgagaccagagtggagctgaaagaaaaaaattaaaattaaagtggctcacttatcaaaaaccaaagccacagagaaaggggaccaataacagcatcctcttcattccattttgattaaggctgcaggcttatgaggggacaggaagctgggagaatctcaagaaaagaaaatgcagtccctaaatgccacagctcaagaggaatgctccagcctactgtctccaatggagaagaacaatctgcagattgacaaagccctctgtttacactcctgaacaaataaactaatcatgcctttgtttttaacctaacaaatcatagcctgattacaggtcattagtgaccattaatatgtgaaactgtttgcatttcactagtatatctgaataacagtcttgcctttcacactagctcagtcaagtttccaaaaggaaagccccgttatcaggccacgagcaggacttaaattaacaattagcctctagaatcgaactatgatgcagaagaattcattattttggttcattgtggttccgcctactgtagaaccagtctttgcctttgtagtggagacatgctctttgtgccaaaagattgtgtgaccacctctctccaaacattctcaacaattcccaatgactgctaatgtgttggccagcaacatgaacctgcttatgtgacaatagtatagacggtcctaagttcacaatacgatggctgattagagtacagataaatgcagggagcacattgggaattatcagaaacatagaagtgacaggaaaaaggtctatttgacaaaaaagcggaggcagagtagagagtatgtatacctgagtgaacctgataatctagaatttttaaaagtgcaattagagctttggattatcagcattaagaggcaagattcttcaaaggaattggataattgccaagcctccatttcattttgtgctgagcagtcgtcacagaggggcatggagtgattaacagagattaaagatctcaggaatgtttgagaactttctaacatagcagttgccatttaggagcaaacccatggtccaacttatctaatgttctgttgcttcaaaaaaatgtcccctaggaaatgccacttttgactactaatgtgttgaggccatagaattagaggcattgctaacaaatcaagaaatggcagcccatatattgctgcaatcatttttactttttattctggactagctaccaaccacgtgattcatgccccagtttaaaatgcataatgatagtatagagttccatgtagtttaaaaagtccttttaatccattatcctgctcatctctatatcagcttatgaaagttagattatgaatagtatagtaatggtgcaaaacacaggttctaagttaaacttgtctgttttcaaatcctggcttttctactgctaataaggtgactttgagcaaatttcttaacctttctgagcttctttttgcttatctgtgaaacagataataatgatgcctacctcaaaaggtgatttcaaaaccctaattgagtaactaatgcatgtaaagggcttagtacactacatggcacataattagtgctcaataaatattaactgctatcattttttttttccaccagcagcagtatccactatggccaccatctccatcttccacagaataaggaaaataaaatatctacgatagactttttcctgaagtcacccaattactaaataactgaggtgggactaaccatcatcttgactaccattctccctgcttggaatacttttcattcttcttccctcctcctcatccttcaggtctcagtttagccatctgcttcctcatgagccctgctctgagccctcttatgtcatttcacattctcttgtacttcctccatcagagaacctctcattctgcattataattgcctgttgtcctgtatgtgtcccctactaaaccacaggttccttaacagtagagaccaggtctatatactaaacctttgcatccccagcaccgagtacagcaccagacacatagtaagtgcacaataaatacttaataagtaaaaggatggatgccagactcttcattcccaatctgctgacacacattaaattattatttcacactggaatggattttagaaaatcagagagagccctacaaggcttcatgtcttatactgctcttaaataatcataatctcatgtcagaaattcaaggcaatttttaaaatacataatatgttacatatttatggggtacatgtgatattttattacatgcatagaatgtataatgatcaagttatggtattcgggttatttatcaccttgagtatttattatttctatgtgttggggacatttcaaattctctcttctggcttctttgaaatatgcaatacattgttgctaactacagtcactgtactctgctatcaaacattagaatttataccttttatctaaccgtatatttgtacccattgaccaacctcttttcatcaaggcagtcttaaccagattctaatagattcaatttctgaagaaagtaactaaacttgtgaaaatgacaccttgaagtgattcttacattatattaaaacacaagcacgtgtgtatagacacacactcaccttgtacctcacactgatcgctaagctgtgcacaatacttatatagtcaccaaccctccaaatttggagaagggcactgtctttgtactttgaagggatttttcagaaacatttggacttgatgaggcacagtgaaaagcaggtatttatcctggctattcttcacgacaagctcttaaaatttggactctgaactgtctctcgcagtttttatgtttttagaaattttgagtctgatatgacacaagtcgtaaaatttgaccaaataacaaaatacttccattttttttctccctccatcttggaggaggaatagggggcataaaagttggaagctccagggaaatccactcaaagctattcagtttcatctcattaaagtaacatcatcaagggcaaaccaaataaaactcaaacccccaatcaatattatattagaatgcactgaaagtgttacttagttggtaggaaggaaaaaaaatcgtacattgaaattacaacagatgtaagccttttattcaaatagaccagagagcaaaaggtaatttttcaatagcaagggaagagctgaactctacctcacatcaccaacactatttaaaagcaaaacctgctcttattattttatataaaaacacatttaaaaatatcacctgcatggagtctctataaatgcataatgctaacattgcatagttcccttaggacacaaatgcctcacacatctttatccatagtctgatggagaatattcacaaacatatatgcatacagacacaaacacagtatacatacacatacacacatacctgctttttgttttcttccctttttgaactgtgaccaccttttaaattttattagctctatgataaaatatttatctagagcctttttccctcttcgttccttttattaaagggagctcttctcttctgaatgttgtactctttgatctctctcagggttcatacaaactctgttacaaactccacctctaaagagaatctctgatgattctctttcttaaatcaaaatacagttcttttgtattaaattttattttccattatcccaaaatatagccaaatgtggaggctgtaaagctaaagcctcaccacacactgtatcgagaaatgaataaaaaagcctagcagaagccttcatgctacttcatccaaatcaagtgtaactacttaggagttaataatgaaagggctttagaatatttgatacaggtgagaagttgtttttcctacacagtgatttctagatctattttctcattggaaattacctgttcagtgataccttttattcttcgttatattcaaagtaagatgcccatattgtctttctttgcctcttgaccccaagctctttttctttgtgtcttgaccccaagctctttttctttgtttgagcagttaatatatctactttgttctctagcttattcaacaaacctaacatcaataaagcaggctctattcttgtttagccaacactctctctcctggtaattttataaccagttatatcatccccatgtacatttggtcaaaatatgttcttgttcttaaaacagtaaatcaaactatgcttcctatgtacaataactatttaaaaaatgtaaattaacttgtgtcctacggaacaaattttaagcaactggaactatttaaaaaatgtaaattaacttgtgtcccacggaacaaattttaagcaattggaactatttaacacttctatactgctactttatcaagaagagtaggtataaataataatacgaatacctttatttccataggtgttttcatctggataattcatgcttcattattgggccactattctctgtcttgggttctcccttggctcctgtgacaaacatggggttcagatccagactccaggaggtagtgatgcttcaacttttggtaacatacaggtgcatttacatactttccacataccccctaccatctctttgggagagtttgctccaggcctgtcaaaatccaggctaacaaggtaacacaatcaacactgtaaaagcttccttgcctcagccccgtcgacctgaagtggactgcctactcacttgagaagacagacagagagccacggtctcaaagtgttgctcctgatcatcatcagcagcagtaggattacctgggaaactgaaaaaatcaaactcacaggcctatagacctattctaagcttgagggggtggagcctggaaccttgtatttaacaaatacttcaggtgattctaatgcacgttaaagtttgaaaacagctgctgtatgacctctagggagttttgaagaggctgtagtgatcaggagagctggcttcatatagccaaagtagggtcctgtggacaggatactcagcgtttggggtagggttttatggtgcagggctaggagcagtgggtgaaagagaatgctctggtgcagaacaacttctatgcaataggaactattcaggagcagaagtaagtcacctcactcgttagaaatggccccatttctctgcaagcgttcagaagtatgaggttatatcctacgagaaactatgaaaaaggtgatataagaagaaatattcaaaataaacgtgtaagattaaaaaaaattaggccttaatgggaagcttcaacataccactaatatagaacaaaaggttcataattagtccattattgttaattttttagtatcttaaatttattatccttaaatatcctgctgatggtgcatggagtagataatgagttttagtttcctcaatgtttcatttcatattcagaaaaagaatccaacctaacagattatttaaaagagataaaatcaccaccagccagtactgatactggatcaaagattaaggttagtgtattaacttatttgtcctctgttttgtaatcaaaacaactgtcttctaacggtaatatcttaagacatatacataactgtactaatttttttttttttttgagatggagttttgctcttgttgcccaggctggagtgcaatggcacgatctcggctcattgcaacctccgcctcccaggttcaagcaattctcctgcctcagcctccctagtagctgggattacaggcatgtgccaccacacctggctaactttgtatttttagtagagacagggtttctccatgttggtcaggctggtctcgaactcccgacctcaggtgatccgcctgcctttggcctcccaaagtgctgggattacaggcataagccaccatgcccagccaactgtactaacattaataaaaatacagcttaacatttagcaattactacctactattttcctgggactgtcatgagcacattacaggcaccgtcacttttaatacttacaatagccttatgaggttaagcattgttatctttattttacagatgaggcacctgggcttagagaggttaaataacttgcccaaggactagcaagtggtggagccaggatacaaacccagtcatctccagagtctgttttcttgactacttttttcatataattctaaactctagggttgggagggtaaaaatgtatgtggtccagtgcaaataatacttatgaccacttaagtcttctaaaactactaaaaacaaccaactactcactgaatgtttaatctgtgtcagggactgaactagccatgtacaagtattatctcacttaatcctcacaacaaccatggaaagtagttactactattgtcttaactttacataggggcaactgcagttagaggatttaagtaatgagcccatcttcttatcaaagatttcactgcttacataataaaatggaaatgaggcaaaaaaaatacacacagtactcagtaaatgttgtttactagtcactagtaaattagtgactagtttctggggatcagaatggtgttggtgatgatcaatccattgtttttcttacctattttcttgctcattccaaatggtagatatctgtgagttagatacttgagcgcaatatacagccatgacataaaagtaaatccactggcttctctatgtctttattatcaccaaaccctagtgctttaaggcttgcaccactgtccaggaatgtggttccagagactcttccacttggcaagagtaacaatgagtgactttaggaatgagacacaacccatgcccaagccccaaaatcaaaggtgtaaagcacaccaagttgttccacccaaagaaccttgttctaaaaatgttagtggtcagtgtcttacagagagtcagcaagcagatgcacttttttccaagactataagatttcatctagttgggagtttattgatttatctgatattccaatatcatagaaagagctcggttttatgaatcagtctctaaacctcagtcttttctccaccataaactaggtatgtgatcatagacaagttgattaactccactggatctcagttttctcactgaaaaaatgagaataaaggaaatttactctttatatttgttgagcagagtagataagagctgtgaaaatgctttgcagaaatacaaaacccctcccacaagtataagatgacattactattttacataactccttccttgcctaatatttagctgctaatgtatcaacctgtttggagaagttggtttattgaagaactaatttaaaagcaagaggaaggggcaattcttaagagttgaaaactatcagcagtgccaaagacaactgaattgtttgatcagttgttttgatggttaagagggagtaagatatttattacctgggtaaccaaataatgtgcatgttgcaaacccctgtgacatgcagcttatctatctaacaatcctacacatgtacttctaaacctaaaataaaagttttaaaaaaagagggagtcaagagccagtaagcgtggcaaaccccccagataagttcatgttggtatgaaatagcctgagaaacctttctgtgaaagcaacaaggaatatcacaaaactaccatgtaaatgaacaggacataaatagcagctcaacaacatgggctctttgggtttctattcaaatttcaaggtgccaagtctcttgcttgtctacatcagagagtagaacgtggcctatgtatagattagaacatcagggaaaggaggtagtatgaaggacagttttgtgtagggaaaaaaaagaaattctatctgaagtttaccttggagagatgaagaaaatatggtatttagcactattaagtgtttttccatcttattggagagattcaaccaaaaggtataagagcaaaaacacaaaaatcaggaaaacaatttttctagtgattttacctttatcttggactatggtttcctctcaaggtatctagcagattaaaattgctttgtgatgtggcaccaccatcctgcttttccttttatagctctcatcttaaaacgttttacaggtccacacaaacaggtaaaacaaaagccatcatgctattttaagtatacattttccctgggcctatcaaatttagaaaagcatattcactctttcaagttgctagttgtggcttgaactgattgcttgattaatcactcaaactctggctctagaccatcttacccatgttcccttttcagtatatcaaaaacagaggtcatgagattgcttagatcatgaaaccaagaaaggaaatcaagcctttgacacagaaaacacaccacactttctaaagcaagatcatcttatgagtggatggtagtattctcctatgtttctctgacaaaatgtacccatactctgtctttaacagcctcattgccatacactacacttgacctgctgccccatatgcagacctctccagtaggtccgatagtcactaatccactgactaaacattttaaaactggctttggcaaaacatgccagaaattccttcagggtaattaaaaccaccctctgtgtcaataaacacagactgaaatctttcatgtgcagaggggctggctctgacccactggctctaggacattttttcttagatgagttttccatcattgcaattgattttcactgactcatccagaccgttgctcagtccccttataaaatgattggctgagatcagagatatagtcttagctttcttgtcgcagccaagacataaggaccaaaggggctataaatctaagggccaggctcattgctaaagccttttcacccagatcttcaggtgacagaccttaaaaaggattcttgctatagaagctgacagtcacagtgttcacttatcactcctcttccagcattcaaactgaattttttcttttttttttttttttttttgagactgagtctcctctgtcgctcgggctggagtgcagtggcgcgatctcggctcattgcaacctctgactcccaggttcatgtcattctcctgcctcagcctcctgagtagctgggactacaggtgcccgccaccacgcccggctaatttttttgtattttttgtggagacagggtttcaccgtgttagccaggatggtgtcgatctcctgacctcatgatccgcccagctcggcctcccaaagtgctgggattacaggtgtgagccaccgcgcccagcctaatttcctatatttttagtagaggtggggtttcaccgtgttaaccaggatagtctcaatctcctgacctcgtgatccacccagctcagcctcccaaagttctgggattacaggcgtgagccaccgcgcccgtcgtcaaactaatgtgtcttcaaagtaaaaggaagaactcaggtgaatattcgctacattaattcccagagactagtcacatagcagacactccatgaattgtttctcaccacaatggcagccttactgtttttattatataaacaatgtatatatttatttaaaactgtcatacattataaacaatataaaaacagtagaagttacctaaaatttcatcagcctgagttatcaatatatttttgttgccatttttccatggaattctttgtctatacaaataaaattttatataagagaaatcatactttacataccctttttatcatggatgaagctacctttgactttctttaaaatacagcattgtttttttttttttttggcttgctgctttcatccccctcatagccaatattaataaactttcacataatttttcttattgatattatcatgtaataactcatataatatgaatgaagtttcagttgctcagtaaatacctgctgaatggttaaagagtgaaagaacacacgcataaacacgagtgaatgaaagaataaataatctattatgatcttaattagccagtacagtttccaagtgattgcagaaatctcagatcacatcttttgacatctcccctgcatctttaaactttagttggggtaggaggacctggctttacctcattcagagggacctgcaagtctaaactcccaagaaaagaatatgtaactggctgctctcctaactacagaaatgctgttaatctactctcaaattgaaatcaaattcaaaaaccattactaagcacctgtgtgccaagaaccctactgtcctttgtatggtaaactagagggaaagatgtggtcactgccttcttggagtgtctgtcttgttggggagatgacgtgcaggatctgtgtctttagatctagctgtctgaacttggacctcagttgccacattcgtgaaatggggaaaatatctataagctcataggattgctgtggtgatcaaacaacttgaggaattcaggaaaaacttcacaggaaaatgtggactggaggcaggccttgcaggtaccagggaaggggaagcaggaatggcctggagtagtgaggacccagcacaagccagcctcaatgctttgaagatcaattaggagagacttaaaagatgagaggacaggcaggaaacatgaaggtttataagcacaggagaaaactgtgaacagactaatcttcttaaagggtcaaagaaaagtaaatttttttttttttttgccttttcagcatgtgccaatgtctacatcaaggccattcatatgagtgactcaaaggcaacctgcttgtcaagtaattggaaaaaaaaaaaaaaaaaaccctggcttacataatgggctcaaatccaagtttctaagacttataggaaaaattctgatcagaaaatttccatctcaaattgtgctgaggaagcttgaggactgagtaagcatgttgccagctgaagtacaatacgataatcagactgcttttgcttttttttttttccacagtgcacagagatttgtaggtcctggtgggtgcttaccaagtttctgatctctgaccccagaaggggtcagagaacctacagaaaaatacatcttgttcacaaatggaactgcacccaaaactttccctctatatcctattaagtgaccagaaggtcttgacttctaaaacatagtatgtcagtttcacccaggctaatcctacagaataggaaaagggattagaaattagtcattgcaggatatgtcagctggaaacactaaactgtcctaatctcttctgatagttcagggttctagggaagctcttctctgcctgtcatatcttctccttttaaactggcaccattgatgagttccagtttgcatgtccctacagatctgcgctactctaattaatcccacctacccttggctccaagacagaagaggaagaggatgaaaagtagattttaatattgcacccccaaatctccattgaaacttggagtttctagaagatgctttaacacttttagtcctctgagaaggcaactgggtcacctactaaccaccacaaatatttatccattcaactgcccatccatccatctatccatccatccatccatccatccatccatccatccatccatcctttaaattttatgtgcttatcctgcgtataatttttaaaatattgtataaacttttttaaattaaaaaaatgcctcaaagagcttaatatttttatttcaataacccaagacacttcaaagaggaagaatgttctaaataaatactcaggctaaatgaattgagatttcacaccgactcccaactgtaacccccaaagactgctgaaatgcagacagccaatatactttgaaagtggactaaaaatcgctcactgaaaatatggacagaacaaaagtggaaaagggccatagcaattacaaaggtattccttggaacagcgattttagaaggaaatttattcctatcatctagaaacataattgttcataccatttaatccagtaatcttgcctttagaaacttgttctaaaaaataaagacacggtttagagtcatgccattatttatctatttcacaattattacagcaatattggaaagaatctaaacttccatcattaggtggctagtaaaattatggttcaactatagaatgttaactacagtggtaatttataagatttgtactttttatttagattaaacaatagtgccagttttgggagaagactagagatgtctggaagtctaaagtcattgatagttaaagtctaatttttttcagatttgcctgggttcaaatttcattcaaccacacatagtattaaccaaaaaaaaaaaaaaaaaaaaaaaaaagcacagctttccgaaatgtcaaatttgtaccccatgagagactagctcattaaacaaccatactggttgtcatactgggtcaatcattctttgaagttacctactcaccagtttgaagaaaattaacatttctgggtcaccaggttccatatactcatctacaaatgatgccctggaaccatgaaagtaattttatttaatataggtgggcaactgaatcccagggtacaaactactcacccatgtgcttaatggcagaggctgagaattgagcctgcctctcctctcagaaagggtcgaagtacctggagctttgcggggtagaagggcaatgggatcaaattaaaattcaatggctgtatctttaagaattttttctctgatcttcaccccacataagtttcctaggataaacttaagcaccttgaaaatttgtgacaatgtgaggtggaagcaaaatatggatagaacaaaagtggaaaacgcctacagtaattacaaaggtattccttgggatagccattttagaaggtaatttagtcctatcatctagaaacataattgttcataccatttaacccagtaagctacttttagaaacttgttctaaaacataaccaaagacatgatttagagtctataacataaccaaatacattatttatatatttcagaattagtatagcaaatattggaaataatctaaactttcattattaggcaacaggcaaaattgtggttcaactatagaatatcatagaaaaatgctaacagtttgtgtctggggcaaaagcaaacaaacaaaccctatagatgatgttgttttgcatagaatcctagcattctccattcatctctctctttgtctctgacacacacacacacacacacacacacacacacacactgagcctggaaggaaatatagcacatcaaaaatgtttataatgactgtctctggcacagctagaagtaaatttgattttctcttttagaattttctgtacagtcaaaattttcataatgaacatgtactttattctcttaaaggatcttccttctttaacaggtttcatattcatattcacgtgtgttttttaacgtatatattcccaatagaaggcaagttctgtgagagcagggtctacatttaatttttaaatattttatacctaggttttttagcacagtgcctaatatataataaatgtttttaaaataactactgagtgaactattggacagacactgattagaagggatatggctatgtgtgaggactctaatgagctgtcaaacattcattccattacatctctaatctccagctcacttgttaaaacaacatgccaccttcctcgcatacttttgcctcctaacatcacacaagactctgcctccaatgaggaaagccattgccacccatctctacctgccagcatcctaccaaggccccacctccccacttaaccacttctggtgaggtgagcttccctctagcacttactgcagccactcacttagacgattaatactgtttggacctctattaggttcccggtactcttctagaacaggggtcagcaaatgatggtctacaggctactccttgattttgtaaatagagtttcactagaatacagccatgtccacatactacaatggaagaattgagtagctgggacaaaggctgtatggtcagcaaaggctaaaatacttatcatctgaccctctacaggaagagtttactgatccctgctctagaacatcgacataattttacaaaatggagataataccaaagtttcattctattagaatattcataggcaatatgagatccaaagtatatgtccaataactttgtacagaaaaattattgtattgtacgtcagtttgctcttaataacatatatttttatgtcagacatacctgcattcaagtcctgggtctgctgattgatactgggaaagatgacacaaattctctaagcctcagttttatcatcagcaaagtagaaatctattttctctttcactccataagtgtgtaatgagtgctttttcaccagatactatactaggagatggataaacaatggtgaataagatctaaagtctcacctaattcagctctaattatacatacttttgagggttgtggtgaagattaaattatatatatatacacacacgcagatacatacatatatatacacacacatatatatgcacacagaggcatctatatcatatatacatcatatgtagtataccatagatacataatacatagtatatcacatagagtacatccagaatacttaacctgattcctgctacattgcaagcactcagtatatagtggctcttcctcatgatcataattacagcagaagtccttttaacagacctccaagtagctgacactccaagaagaaaaagtgccttccattctttctgtaaaacaggcctacaacatcctttataagtactcacagctaattgagtagactaatctctggtacataggcaaacttctgctccttcaggttgagttgcatgtttactgagagtcatttgtgtttgtttccaaatctcctgatgcaagttatacttgttagttaattaaatatcatgaaaggtaatgagaagaatagtgttaaaaggaggatgattgtttcatatgaaaagtcagttgaagaatttcaaaagacttgacaaagcattgtcaaattaaaagtaggagatataaaaattggggaacaattacaaaaatctagaagtattctgtagtaagattgcttctgcgatatctatggtcttgttcaacctcaaggaaatcaaaattgggcatggtctttgtcatttgggggacagttcatgcaagaaaaatattacaacccctaatcagcagatccatactcaaaggtaaggtcttgattcttcatcgggcctttcattgaaattagtaaatttaaatggtatgttattttttatgactccttgccttaacttttcaagtttactgtcaactattggtcccaaatgcatggagtagagagggaatcttttgtatttatttatttatcacatataaatagtaacatgttgcctcatcccctgccatatttttgttggcaagaaaacactcagcaagatgaagtgacctgcccaaggccacagaactagcatagccagaggtgtgtctagagccaggtgggctctgattccaccacttcggccacctcatgataacagagagataaacaggacacagtttcacgcaccctggcttctgtggttaattatattttgagaaggacggagtgtcacctgcccaaatagatggaaagacatttgagaacaagactataggcttatacttcaccatatgccccagaacttcctacatagcacttggcaataaataatttttgtttgaattgttaaattttctttcctactttataatagtggaagaaattggggccttcctggtttctgaaaaaattatgctcccttggagtttataacccccaccatggagtataaaataacaggagagaaattctattgtgcctgtcagatcatgtcattgagagcttaacctcattgattggcacttgctcttccccatcagtgtggcaagatgagcagcaccctgctcaccagatggttatttgttccaccagccacctttgctgagtccctgattcactccagcccaggactgtctccagcattcatgctgcaaggcagctcctgccaacaactttgccaaatggctcctctcaaagtcatggctgcccagacagactggctcctccatctgcagcagcttttggcaaagagaagtttccctttctggctctgcctcttggctgcaccagaaccttcttgccagaaggatgatttgacccaggaagtacagccagacctggaatttctggggtcatttaaagcctatggccatgttttcccagtctcacccctgaggtgaacatcagaacatatcaaagagacctagatgatcacaaatacagaaataatgcctcatagaaactgagagtcagaaaagtctgtagagagcatgccttccctcccccatcttcaacctcattatagtagcttaggaaactgaagcccagagaataaaagtgacaaattatggtagcaggactggaatcctacccaggtcttctgatgtgcattccacataactgcttacgatactgcattgcctttccatttccccccagttcattttcaaatccttggtagaaattggacccttgtattgattgattcagaagaatattttttagaaaaatgaatcatcttttccctatcaacatcataactgttcttttaaacaggtgttcatatactacattgtgatgaatttttgccaagtttaagaatacagggtttggaatcagatagacctggatgtgacttctgttctactcactgttgtgtaactatggactagtaatcatattattctgctttaacttttcatttaaagggggataagaacagtatcagcctatacaagtaaactggattacatgagaaaaatactttaaggctctaagcctgtactggtgcacagaaagccctccataactaccagcaatcattattaattattaacattcaaatccacaatggttttggaagacacagtactgggcacatatgaataggtagatcaggtattctcattctctacattaggaaattcaggttcttggtttaaatgactgatccaaggttacacagaaaacaaatagaagaccacagatttctgattttttcttgccattttgctaagaaatgggaactgtcatctcagctttaaagataataaaatcaggaaggaggacatttaaacaaaaacacatatacacagataatcactgcagcatcttatgtaatataaaagctggaaacgattttctatccacagggaactactaaataaactgtggtactgtcatactatggagcaccgtgcagccattaaaaggcatgagacagatgtaggtgttctgatatggaaaaatcttgaagacgtatcactagtagaaaaacaaagtgcaaataaaacgggcagtgtgtactcatttatgcaaacatcctccccaactatatatctgtacatgtatatttaaatgtatgaatagaaagatggctctgaggaagtctaccaactactgataatggtaacctttgggtaggaaagtgggatgggcatgggatggagggtgattcatgctttatttacttatcatgcttgaatccttttaagtaagaaagaatatagtattatttgacttataaataaaaacataaaggcagagggaaatgtgaattataataatgcagttggcatgaaccaacagacctcccaacttgagtgtctctagccctaacctgacttctacaaagctacataagcaatgttagtttcactgagtttcctgtgtggctctcccactgtggtagggtccttcctggtggtattttgtacttagggacccaagttctatctttcagaccacctgggaactctcagcagcatcttgctacaatattccctattagagacatttacagctttgccaccctctacacccttgtgtgtctgtagagggacatcaagctgatccttctacgtcaagtggaggaggcggcctgccattctttgaccacttcaggttcattgcttagcaaggattcataccagtgtgataagcaatgcttgatggaggaggttttcagttccccagtgttatggaccaaattgtgcccccctccaccccaatctatatgttgaagccctaactcctatgtgactgtatttggagataggtcctttaaggagataattaagattaaatgaggtcataaggataaggtcttatggggctggtgcccttgcaagaagaaaaaaaaatgccagagattgcgctctctcttttcacacttgcacacaggagaaaggccatatgaggacccagcaagaagttggctatacatgggaagagagaactcaccagaaaccaaccatgctggcaccttgatcgtggacttccagactccagaaatgtgagaaaacaaaatttctgttatttaggcaacccagtatgtggcgtttttaaaaatgcagtctgagctgactaatacaccaagcacaaaggccagtacacctgaaacacatcctcccacaggtaaggtactcttcgccacgctccgtccaacagaccccatccttctcaggttaaaacctgttcataagggcccctctagattcctaaactccatacatcttttttccccttacacacagacccccaccccacttcatttaacatttgttgtaagcgatcaagtcatttacctctaaagcacagaagtgaaagtctgactacccccatacaagcacacaccctttctcattacccaggatgaccctttctccaaagaaagctatgaacattaacaattaatatttcccactattaactctttccacagtgaacttggagcaggagaactcaaaggttcctgggttatttctgacaaagttcctagtggacttataaaaataatctgtgctttctgcgagatagttatgttggggctgactttcagcctgattctagagttctattggagtcaaaagaaggaaatttggtggtaaagatgacaagttgggtgaaagcaaaatcgtcttcttattaatggaagatgaggggaaccagctggagagccactctggccaaagtgaagcctcagacatctacatatttatgtgcaaaagaacatctgccatcccacagctgcctccgtcatatttctcttgctgtggcccaggcaactatatgagttgtcatgagctgggaagagtgggtgcctagatggcccagcgggaccatctcagctcagctcagtctgggagctgcatgcttactgtcctacactggggatgagtgacatggagaaagctattcaaaaaactccagctagttctcacatcttgattgctcaattccataaacatttttttctgttcttattatataacagaagaaatctacaggagtaagtcagctaagaattctgttactgggtcgtagaattcagcttcctccctgtgggataatggaaaaggcccagagacgtgcactgctgtgctaggagaagatagatcaagtaaatccagcagcaccgaccaggcgccaatgggatatatgtggagggtggagcacaacttgcatttctccaaaagatcctgagcagcatgggtgagcaaagaacatgtgccaagaatccacacagtcatgagctctaatctggttatgccacttacaagtgagtatgtttgtaatacatgtgtatttgttatgcaagttcctttggttctctgtaccttgaaatttcttattttaaaaatgaggttaatgcaaccattctctctgggttgttgatggagattaaatgagtaaacataagaaatacctaggaaaatgcctggaatagacagtactcgcgataccttagtttctttccctcagctaagtgtcgaaattggacccctatttcttcttaaatgcaaacgccaaagtctaggaatgtcagtctacagctgtgctcttttcattgggcattaccaatattttgacaggactggcctaatattattcaccccaggatcattggtacatttctgaccagcactcataaagggcttgggattgcccctggggacctggatgctaataatgaatacttgctagtgattttcaatgcattctggttattatgtttagtagcagaacatttcccatccccagaaaggtcatttacaatagtgtaaggcagctacttctcacctcgcatttcaggtttctctgagaacagcagagagctcaaacattcatccatatgcattggaaacagcattctgatctggcatttgcatacaaataccaaagcaacttaaggaactatgaggcagctctccatcatatgacactacccccttttattttttcaatgccttcccagcatcttcatatcaaaagccattttcatgtaccttcccagctttattcattataagtttcccctttcttgagcttatttggaatgggggatggaggaggaatctttacttcctcacttttactctctgtggccctaaaaagctaatgtatttcacaaatcactcagatctcaaacctggagacgttctaaactcaactcatccaagactggactcttcttatcctaccacattgctgagaaatggccatatattatagtattacttgaataatatcagtgtgtggttatttatgcttaccaaggccctattctattgtgaggtacttttttgctacaatttcttcataccaagccaagatccacttccttgtactttctcactcattggttcaaattttgccctgaaatgttcttatctgaggcatctcatctattcatacagttttaagtacctttaatatgctggtgatgtttaatctcaaatttattatctagtccaggtctttctcttgagcttcagacccagaaatccaattgtctacttgcaagtctcactgtgaaactagatgtctcactgtcttctcaaactaatcagttttcagtctgtttccgcttttagtgatgcgccccattatgcatccattttcatggcaaaattctgggagttgtccttgacatcaccttctccatctgcacccaatcatagtaagtaagtgcaatgcaatctttctctattacgtatcttaaatccatctaattctctccatctctactgatgccaccatcctggagcacaccatgacctcctaattatctcccaactttcattctttttcattacatgcctggctctctaaccccatcctacacagcagccagattaaacttctagaaaaacaaatctgatcatgtttcccttttccttaatggctttccattcatctttggatagagtccaaactccttgtggtcaacaaggcttgatatgatctggtccctgaatacttctccagtctttttttcccccaacattttattatgaaaattcaaacagactgcaaagtggaaaaaaaattacagtgattatccatagacccaccacctcaatttagttattaactttttttttgagatggagtctcgctctgtcaccagactggagtgcggtgtcgcgacctcggctcactgcaacctctgcctcctgggttcatgcgatttcctgcctcagcctcctgagtagctgggattacaggcatacaccaccatggctggccagtgactaacattttatacttgctttatcatatgtctatccatttacccatccctctctcttagcattaatctttcttgcttctggtacatttcaaaatgaactgcagactccattctcatttttatcactcttctccctgttcctagccatagtcatctttccattccttgaatcagttaggctattttatctctctgggcttttgtacctattgtcccttctacctaaaatgctttcaggtcttgttaattgcaaattcatcctttagttctcagtttcagctgtctgagaggctgtccttgaactcccgatctaaattagatccacctttccaccttatgaccccaaggcatcttgtgcctttcctaaatatcacttatcacaattggtaactatatatttatttgcaaaattatttgtctcatactatctcctttgctagattgaaagatccctgaggacagagaccacgtctgtattggaacatcccgtatcacctctgcaaaacgtcagtatttgttgaaggaattaaaggcagaatgaatcaataattgaaaggagctacttggaatagtaaacttgttcttcctttaatatgtataaacaagacagttttttaaaaaggcttctgagggaaggtggaacccacttgttgccagaatataaccaggaagtacattaagtaacaataacagctataatgaattaagggtgggctttgtattaggcatatcccgagtgcttgagtgctttctctgcatcaaataatttttctttggcataggttctattgttattcccactttccagctaaggaaactgagaacagagcagttattttaaaacaccccatctatgtagaatatttggtctatctgtggccccatttgaaagtaggaagattaatctagaaaactcacagactgctataatggagatagggttttacttggctgtaacagaagcctaaaaatatagcaggaaacccacatatagagagatttgagagatgaatccctggttaggaaacctggggttccatatctgaaaaaaaaaatcaaaccattgtgttgactttatttttgtgggaaatttcaaccctacccaaggcccttcctctatataaccccatacacacacttcaaattttccctgcaaaggattttatgcctgatggaaatatagcttatacactgagataaaaccattgcaatctttcccagaataagagctgatggttaaaggaaaatgaagtagtgcagaatttcctagtgggagaacctggccttcagacactggcttgagtttgaagacaaggttttccattgaatgtgtgacttttggcaaattagtaacatcttcagacctcagttgcatcagtttccttctttgaaaatggaaatgacaacatccatttaacagggtttagatatattgaaatgctatacataaagagctcagcacagtgcttggaacatagaagatgctcaaagatgttaactttaaaagaggaggaaaggtaggggagggtggtaattttcatgctcagaattaaaaaaaagtcctaggaaatttatttattaaatgcacaccatgcattcttttgagaaagacagagagagagaaagagactgagagaggggagcttgggtgaaagtgtcctttagcatttgcattgctcttagctggatgaacttgcctgcagtcaccacttacaatgcaaattgagtttagagtccttcacactaactacacagcaaaaacctttcagctttaaatagaacactgcaatgtggaatgatctgagcaaacagaagaaaaattcagaaatacatgtgaaggagatattttggaggaaaaaaaagaacaatctgacataactgagcaggtaggaggaaaatgtagaaatagtaaaggaaacagaaaagcaagatctatggaaggactagaagctaattccccacccagtaagagggtataagttaataagggggaagaaaacttgtggggcaagtccccagtgaggagaatttttaaaaagtcttttgatctggtgctttttcaaggtatactaacacttcttaaggaattcattggaagaacagggactcttccccctctggcaacaaaattgcatgaatcttccctgaaacgaataggtcaaaactgtagggaacttcttgttctatccaacttctggtatttacatcgtttaagttctattttccttttcttttcataccttctctaagatcagattttaaaacctagaagcttctgtgaaataaaggtttgttagttttgagtgtgattagtatgtgtgtgtgtttgagaaagagaaagaaatctgagaggttgattctcacatgccagaaatctcattgctataaactcatatctatttttgactatgtgaacctagatattctatccagaatcagagttttcaaaaatggaataaaaataagaacaacggtaatatccagggccctgaaaacaataaagaatgccatttttaactgatttcttcacttcacaattgacactcctgtacacatagctccactctgggcattttctcagcttgctaagtttctcttgcctgcataatgtaatatacaagaaaacatgaaggcagctctctttctttgtggttacaaacagaaataaatgttcccccaaaagccaacagacccaaggccaacttctctcttggatgacatgcttagatacagagttagtcatgtgctatcaggtcactgagtcagtgacaaagcactaagattgagggagaacatcttacaatcaggttgccatcatgcacagaaaaagaatcggtaagtatggtgctctgtataggggagggatgggctgcacatcttaaaagccatctctaagctcctggaagccagagcttacaactctgctttatctgtctagcaccatgggcatactgggcttgatgctctccaaaaatgatgacaaatggagaatatactttcaatagcactggacattctttctgtctagaacttccagggatgtttatagaagatgccacctttacccccagatgtgtgtgtgtctttttatttctttcagagcttgaactcttttactccccccatcacatttctctagcagtcttttgatttgattaaatattacagaaatgttagcatccaagaataataattttaaattaatacaccttgcaacattgtcctaaagcatttccacatacattttctcgcatggatattacaatgtgataatgcaacactttgtatgagtggctaaggataaaaggcctacaggtagaaaatgaaagcaaaaatgcaaaagttttggcactgggggaaaaaaatgcctctactctctattcacacacaaaaggcagaatgagattccacctgctgactttcccttcctgcccgcacagcactagtgcttatgtcagaacaagctgggagagagggagagacgacaatttcacctcttggcaaagctcagcttgctgaacccttttgctttctgctggctgttgattcagcagaaactactgctgcagaattcataatggtgatttttaaaggccccaccgatcgcgttgctcaccccacgtgtcagcctcattcgctgcccgccagagcactatttccccagccacctttttatttttgctaatgcacttccaaaaggaaagaggttcgcccgtctgcaaagggctttttggggttttgattgtctaagcaggtaacctggccggccggggagatgaatgggcaggaaatgaaaccttgccctccctgcagccactgagagacataacatcgtttcgctcagggaggggggaccaaggtcctactgggcccctcccttcttatctccccccaagacccctgcgaacatctcggggaaggggtcatctgccttcctggggtcatctttctgggcgagagccccaccctgaaaaagcctaatccctgagggccattttaactcccgtgggcgccgggtccacctgctgctgaacgccgagctcgcctcgcggagcccggatggatgcgaggtgcactggggctgccggggccagccgagcccccgccccagccctagggcccggaggagtctccgccactacgcgcccagctgcccaggaagcacagtgatccgcaacttgcgcccggccccaacggcggaatgcggcggggctggcgttaccttcggtcgcatagctgtggtcgcgcaggaaactgttgttgattttgcgggtatcaatgtcctcctccattgacagcaggcttacttgcgtgggaaccagaagccggcagacaagtatccatgatccctccccgcagccagtctcacaggagaggggggcaggggagccagtgggactgcaccatggtccgagcctgaggaggagacggggaggcggagagaaaaaaaataaaaacccggcaatggagctgtcacctcctccactcgggttctgcgaggctgcggcggctcctcccgcgcggtgcgctcactccagctccagttcccagcgaggatgctgcgcctgcctccgctgcctccgggtgccaagatacgccgtgccccgaggggtctggtcccgcccgcccgccccggaggcgctcacaagcgggtctggggagatgcccaacaggttcccctccttggcagccgctccaaaatgcaaaaaagatccctcctccccctgggagagcgggcagccgcgacaaaatggtgcctttctggacccgagctgcagtggcgagatggcagggacaggattcaggcttgcctggccggaatgagggtgctggtcccacgggagggcggctccggcaggcgggggtagggaagctggcggggagctgggcagggcgctgcagccggcgccagcgcactcaccctcacacccacacgcgcgcactcgcagctgctgctgctgctgctgctgctgctgctgcaggaggctggaggcggctggtgcattaaaggcgaggctcctcccaaccgcgtcagcagccccacgactctttcccagcagcagtggtggccgaggcagaggctgcggctgctctttgctgcagtggggcgcatgcagccgcgaatcggcacctgggcagcaagcgactagcttgcaggttcaggtggaacgcatagacgcgctcttccaacctcctcccctctcgcgccactcagctaagggccacgtctacgctagcacccagagcccctagctccctgcctttctccggacgcctgaacttgagaacagcaaagagaagtaggttcctttggatagtcaggaagtctacatccaggtcccttttcctcacccttatatgatgcatgtggtcccttggtgaatttaaagggcgaggtttggggctcgaagcttcagaaaaagaggagaaagtgggaagtgccgctcagagcctatcttaagccctctagtaggaataggagggggatcaggggccagaactttgcaactggttcccccattcctaagagtcaaaataccttctaactgtaggaggctggtgttcaataaagcatctgtgtctacacaggtggaggaaagcaccagactagtaaacaggatcagtctgaaaaagtccactctcccttgcagtttgcacttcgttttggacaaattattgcagcctctccgttaggttttgcttgtgcaggaacaccttctatttgctgtcagcatggaaggtacattgaagcacagaaacataagcataagagccctgtgcccacagagagccactgctaccctgggggaatttcaggagtccaattaatacagaaaagagacctgtcttcctacttcaactaggaagaaaatgtagaattccctccccacccatgttttcccaaatttcaaactctacttttgaaagaaaatgagattactattgttatgaaacaaccaaaaacatttaatgaagcaacccaaatcactagaaagccaatttggaaaagacatcaaccccaatcagtagaaagccaattggaaacgacatttcctaggtttcatcttgtagaaggtattcatttcaatgggtaccactgtagggagagacatcagcaaatgttttgctcagttaagctccacaagtttagctagatgggcccagagggacctatgagttaattatatacatacaatgcttcggctaacacaatttagaaagtatttgaagttcagaaaaatggaaaaacaagtccttaactgaggttgggaattgtcattagatttccatgcagtatggatacttctggtagatagaaaatgacatcttcctcatctccagaaattgactgcatatccctgggagaaaagagcagaaatgttccttgacatagttattttgtgtgtgtgtgtgtgtgtgtgtgtgtgtgtgtgtgtgtgtgtgtggtggggggagttcagttcaactttcaatagattctattttattttcatctagtgcttaagacttatacacttgtttgttcaaaatccacatttaaaattttagtaacaggtgaagacgggtacaagttgatttaatccacttcagtacaagttgtcgtggctggttcttccatgggatgagctgtatctatcaccgaggttccaacattcagtccttttgtagttacacattgcagcttctcttggatattggcacaatttggagtaggagcagagtggggaaaagctaagttcatctcttagtgaatcaaaatgatgagaagacattgtgccttcggttggaatgatcttaaaattgtttcaggaggccttggaatagtatttgggaaaatttcccctgtatctttctgaatcaagggctagattgggacagagctgtgtgatgaatcaggtaggcccaggctcattggccaggctgtgcttgaggaattttccattgtaaccaatggggagaatgtcccttccacagatcgagtctctgggtttatttatttttcttttcacatatgctgcaaactttctcctgcatttattcaacagtccaggcatttttcctaagacacatgttctgagaaggcagattggataggtctccattgtttaagtagatttcaaggtttccatttggccaactactcttttctaatatgagagaactagctcatccacccaaaaccaaggggaaaaaagctgttggctctgtgccataacacaacgacctgtggtggaggtaagggagtgaaaagagccctgtgcaccactgtggagctggggggcggggtgggggagagagtgggggagatgggagtaggctgcagagatcagtcttcaaaagactcactggccacttctcttttcctctaaaatgtcaagttctttccaaaagtggtgggcatttccgcatgctatgttctttgccacttcctcatgtcttggcattcagcctcttaactgtccctgcttcgttgaggcattccctgaccacacgatagtcctgacttccggtgttttctgcctccacattttttttttgtctttttcatgtcctacagcgttttataatatttgtttacttattattgttggccattttcactagatcttttatttttattttctttttttattttatttattttatttttctgagccagagtctctctgtcacccaggctggattgcagtgacacgatcaaggctcactgcaacctctgcctcccaggttcaagtgagtctcatgcgtcagactcctgagtagctgggactaagacatggaccaccacacccagctaatttttgtatttttcagtagagatggggttttgccatgttggccaggctggtctcaaactcctgacctcagtgatctacctgactgggccttccaaagtgctgggattactggcgtgagccaccatgcctggcctcactagatcttttctattgactaactgtcacttagtagatgcttaattatatttgttggagacaaacatttcttaaacaaatgaataaattgctgaatatcttactttaatatttaggtttcatacctccccccttcttaaaattcatattaaaataatctgttgtgagctggaaattttctagctcataagctgtattcctattgaaataattggttcgatttattcctgtatgcatatatacgatcaaaatttaccaagcaattatgtaaagaattattctggccaggtgtggtggctcacacctgtaatcccagcactttgggaggctgagtcaggcagattatgaggtcaggagatcgaggccatcctggctaacatggtgaaaccctgtctctactaaaaatacaaaaaattacccaggcatggtggcacgcgcctgtagtcccagctactcgggaggctgaggcaggagaattgcttgaacccgggaggcagaggttgcatcgcaccactgcactccagcctgggagacagagcaagactccttctcaagaaaaaaaaaaaaaaagaattgctctaggtgccaaggatatagatttatataaaacagaatttctttcttcatagaacttaaattctatcatctaattttaataacgtgaactttcttagcaatacagcaaatgcattctatatcgacagactatagtgcaatgttaagtgccaaggctccgatatcattttctgtcacttatttttctgtcctcaagcaagttacaagatctccctaaagcatcattttcttatctataaattaggaaaatgaatagtatttgtttcatagagttattacaaggattaaatgagataatacgtggaaaaaatacattgctattactatgagtatttactttcgtcatcatcaccatcatcaatgttcagcaaatgtgcaagtacttaactatgtcagacactgggataggattatagattcagcaacatcagtgtataagatgtagtcagtctctgatgtcatggaacttagtgtctaatttacagtttatgtaaaaggggccatagtcttcaaagggggcagcagagggaactctgaaagactgacctatttcaggcttgtgctttacatagaaaaggccaattacaaatacacagccttcttatgttacccagttcagtattgacagcatgtggatacattcgtttttttaaccacccttgtcatggtcccctcccccaacactcacatacccactcttccttccttaggctaatgcttcctacacaggaaacttttgggtcaccctgtccaattagcacattaaatatctataattttattaaaacctttgacctaagccagtctggagattcttaatagaggctttaggtgtcagacagtcctggtttgtgtcccagctcaggcatttataaatttcatgacctttggtgagtagtttaacatctctgaacctctatatttgcaaaatggaagaaaacaatagttgctacttcacagggttgttgggtggcttcagaggtaaggaaagtgcttagtccaggtttggctcagagccagccttcactaaaatgacccttcttcctcctgcggtacttcatgagatctcccacttgcagagaattggagagatgcactccaagtcaattgttcatgtgaacagaagtgacctagaaacctcagttttactgcctatcaatctgtcttaatgaacaattagaaactggatacatgaaattttatcatcttgcaaaaagccctttataaaccatgaagtctcctgcaaatgaaaggaatcaggattatcttctcttggactttctcattatgtatgtgcagacctagtcacatttctctattgtggaatcatatggaatttctctctatgatcactaagcaccaattgcacaactctctctctaaggtggtttacgtgctgtctagagaatgacctcttgaatttctagcaagtttgcaattcctgtttgtgcatgctacaacatgtaatgccacataagtgatcctttaacgtggcatttaatctgggaaaagaaaagaaaacctcttgccctcaaagtgttgtattaattctagactctggggtcttaatggattttaccatgtaaatgtctctgcaactgaaattcaagtacagaaacttatgaaaatacacagtggtacactgaagctggtaggtactggctattgagagctgattttgctgatcacgtacatgtctttctagttctgctttgagtgacatcattaacatcagaaatctgccatggtaggatatttatatcacagaaaattaaaaaaaaacactatgtaaattcagggtttttttttttttttttttttttgagagccagttgttaaacatttaccagcctaccagtagaaacacattacttgctgatgtgtctttcccctcatctctgttatcggtgcaaagtcccctccaatttctgtacaataaatctcccaagttatgtcagttccagagcattccaccattcaaccaaacttctgccataatgttaaataactcttaaaatcctacctttccctgagggtttcccatatccatcagaggaaaattgatgtcgttgtctgatcctttccaggttggttatgaaattgccatggtagacttgtgagtaattgcttttatagggctcctagacctaacaacgtaggaatgttcggtcatgcccactctcaaggaatcattccttttgactattcaggttctattgtgaccttagtcttgcccttgatttgcttcaatactaaacaaaaatatctactgtgcgtgatttcactgacagctgttttacttgtctagttaggatattgatgcaaagggagaaaagttacaaaactcaagagtctagatctgagagcatgagataaaacatcttcttgtacctcttaccattcattggttttagagttaaatttaggctgtcctgtgcaagaaagttttagtttacagtatatttgttaggtataaggtgagaatttccaaaaccaggttagcaacactccagggatatactagtacctgactacattgctcaaagtaaaattttagtataatttaaacaagaataactattgggaaatgtctttcaaacctttaaaaaatataccaagaaataccactttacagaatttattctaagaaaataaccatggatgtgggcaaaaatttagccataaaattatttctaaagaacattgcttataatcatgaaaaactggaaacaacccaaatgcccaacaaaataatttgttaggcaaattataatgagttcatatgatggcaaattattgattcatttatatagtaattatagctaacactgagcatctattatgtactaggcactgtggaaagggttttacttgcattgtctcattttattctaacaacagcctctatacagtatcatctccattttactgaggctaatagaggtaaataatataaccaaagtcagatagatgagagcctggcgccaacccatgatctgtctctacagcccatgctcttaaccactgtgatttgagctattgtgagtgtgtgtgtgtgtctattgcagtgggtttaggtcacaacagaatcacctggaggtctctttccaaaccattcaccgctagattcttacttgtctctcttagggataaatattctctcagttgaaaatcaccacaattgtgttggtgaggatgtggcaaaaatcagaaccttcaaatcctacattgcttctgggattgtataacaatgcagccacaaatagtttgccagttcttcaaaatattaagcacagttaccatatgacccagaaatttcacttctatgtatatattgaagagaattaaaagcacgtgttcccaccaaaacttgaacacaaatgttcatgtagtagcattatttataatagccaaaaagtggaaacaacccaaaatgtccatcaactgatagatggataaacaaaatgttatatgtccatacaatagaatattattcagctgcagaaaggaacgaagtattgaaacatgccacaacatagatgaaacttgaaaacattatgctaaatgaaagacaccagacacaaaagatgacatattgtatgattccatttatgtgaaacgttcagaatagacaactgcttagacagagaaagtagattagtggttgccagggactgaggataaaaaaaaaaggggtgggaatgactgctaaagggttcaggatttcttttgcgggtgttgaaaatgttctaaaattagataggggcggccgggcgcggtggctcacgcctgtagccccaacactttgggaggccgaggcgggcggatcacgaggtcaggagatcgagaccaccctggctaacagggtgaaaccccgtctctactaaaaatacaaaaaaattagccgggcgtggtggcgggcccctgtagtcccagttactcgggaagctgaggcaggagaacggtgtgaacccaggaggcggagcttgcagtgagccgagactgcgccacagcactccagcccaggcgacagaacgagactccgtctcaaaaataaataaataaataaataaataaataataaaactaaaataaaataaaataaatttggagcaatagctacgcaactctgaatataattaaaaaccactgaattgtatagtttaaaagtttgaatcttatggcatgtgagttagatatcaatacagctgttattaaagataaaaatatcatcaccatcataaaccactgttacttatggggagtatggagtatgctatatccttaaggtatagcagtgcagaaacgcttaaaagtagtgacaaagatagatgttcatgatgttcaaaaaatcataaaccagaataagccaactgctacaattttttggttaaaaaatgtgcatatgctaaaaggaatatatcaaaatattagcaatggttatgcgtagttttcttttgtgttcatgttttcgttaaaatattttagaacatgcatcattttagattttttagattatcattttaaacttttttagtaaaaaaaaaaaataagtatttttaatgccatgaaatactttataggatgaaacttgtatagaaaagattaaaccattttcttcccaccaggaagtcaagagacacataaaacaattctggtcacatataaaaacatatatgtgaccagaatgtatagaacggctctgtgcaatagaaatataatgcaaaccacatttgtaattgtaaattttctaatttccacattaaaaagtgaggaaaaaaagatgaaattcattttaatatatttatatttgaattttttgaagataaaattatcttatttaatctgtcaaaatataatttcaacatataatcaataaagaattactaatgacatatctaaattcttttcttatatcaaatctttgaaatctggtgttttacactaaaagacctctcaaatctagctacatttctaggggctggtaaccatggttaccatattggacagcagaggtacaatggaactgtttcaaaatttttattccatttgcaaaaagagttttaatgtgttctttaagaaataaatttttacctactagaaacttgaatgtaatgctaaaaccaaaccaaataacattaatctgataagcctcaaaactatttaaagttatacaaactgaagacgaaaatatatacagacatacctatatatatatattatgcagaatagtaattttgaatccaatctgcattttcccctaaaactagtaagctgaataaataaattacaaaaagaccaggattctaatagtaagatgataccatataacaaactcagacaagaaagatgtgatatataattccatcactgttatagttaccatcctaataggtcaaccatttagttcaacatgtataccttcaattccagctaagagaagaagccaaatagccagatgtcactgccaaaagggcactttcatatctgggcatctggacactattataaccaatgaaggtggagaaatttaaaggtacagtttgtaggcatctagtagagaaccattagtagtcttttagattgtactggagagtagaatgttgtggtcacatgatcagtggattaatttctgaggacttattgaattaggtattccattgtctttaactcatacatgcaaacagtttgttttgtatgcaattgagtactctctccttcctaatacagttttttcactgattcctgggcattgctctctctttattctcctactgcctcagtgtacactcctcaggctcacttggtagctcctcactgctgtgacctctaaatgtataactaccctagagttcaaagttcaaagtccacagtcccacagctcaccactcacataacaacaaaaccctaaatctgaactttgagcataaacctctccccagacctccagagcaatatcaccagcagccaagctgatatttcacagggtataaggcatctcaatccctaattctgccccacaataccctgccccaccctcctgttccttcattccactctctcattcccatcttttcaatcctgcctgctctaactttgaaatatgtccagaatcaaccactactcaccatctccactgctgctaccatgctccaactatcatcctatctcaccatgattatatcaatagattcgaaccagtctctgatcctccttcacccccaacccctacagagtagtttccaggcagcaggcagaatggtccttttaaatgcaaatcacttcatgtcacttttccgctcaaaggcttttattggcttcctacacattcagactaaaactttcttaaaatgctggaaagatttagctccagctatagctcttttttttaacttatcaaatgcagcaccaccaaatttcacctcccctcccaccaccaccactccctatagacatggaaggaagacaggacaggaagacaggagaacactcccactccaagacctttgcatcttatgttccctctctttcagacaccagcatagctcagtgctttacttcttctggtgtctgttccagtatcaacttcactgggataccttccttgactactctgtataaaataaattagcacctccatctctgcccgtcactctctatccctatattgcaactagactgtatatatttatttggttttggttattacagcagtagaacataatttccagggagagagaaacgattttgttctctgctttatatgcagtacctggaacagtgcctggcactactagttatgctaatatatcttttaaaagaataaaagagtgaatatgtgtttgctcaataataaggatgaatcacaagggaaaattaatgaacaacaaacctaggatgcttatgtagtaaagggtttacccttgcctgaagagaggcctgggttttgccctaggcttcttggaggtaatctgtatcatatatgacagcaatgtctttgtttagggtgaggactggctccagtggaacttagggtggggatggcaataccagatgaccatgtgacttagggtggaagctttgggtcacatggttatcaggtgacctgaacactaagttcaatcttgtatataatcagtcaatccatcatgtctacataattgagctctaataaaaactctaaatacgaggttcagataagtttctttggttgacaatactttatgcatattgtcacatggcaggaggttaatggcaggggggtaatgcatgaggtcaatggcaggagggtaatgcatccaacaattgaaacgttgcaattggaactctcccaggctttgccttatgcatctctttctttggtttattttaatctgtaacctttccgtataagtcataaccttgagtataatcactttcagtgagttctgtgagttcttctagtgaattatcaaaactgagaataattttagaaaccctctgaatttgtaattgttgtcagaagttagggcagttttcgggattccaccctcaaacttagcagttgtctaactccaggcaatgctaatcatacatctggcaaagttatagctaaaaaatgggcttagagagcattaggtctagcccgtcattttgctgatgatgaaagcctagagaaaagatgcgacttgcccaggttacctggtaatttggtgacagacgagcatgagacctggtgtcctgaatcccatgatcacatccgcacacacacaatggctcttcttaacttttgttttgcgtcatatgcaccactttttcttaagaaggttaataaaaatttattggacaattaagttggcttaactctccagtatgttaaggtcagtgtcaaggggagaaattactactgtctttcaaaactcaccagggccagccctggacaaaattgtaaagtaacacagttcctcttttctcccttgcctctgcttttaagccctgtgatgggccagggaagtgctgcaggaggagctgtatcagtcctcctgagccacggctgtagaggtcaggttggaagcctttatgctcagttctattatctttaaccagttctattatccttcacctacaccatcatggtttgccacactctctttctttggaggaaatctgaaaagtataggcagctttagaagctttgggaaacagcacgtggtaaacttagttcatcatgtgggaaacatgttgacaaattcaaggcattatgcaaaaaaggttgtcaatctggccattactgtactagtgtgataagttacagaagccagaattcaagagttagatggaccttgaacttgtaagcaaggttgtatatattttaaaactcaataaatatttaaggaataaatatagagtaaaaataataatattaaacatcccacaaatagagacctttgcaatttccatttggtatctgacagccctacaaggactgaacaaaggatgaaaacccaagtttataaatttacaattgaaaagtagcataggccctgagccatgactttaacattttaggatcatagatccttttgagaatttaatgatttctctccccaggaaaacagcaacagcaacatagtttagagcacttcctgcttccaaatgctgactcattatgtctatttcacagataggaagaaaaagagagagagagaaaaaaataaggcctgggtccaaagaaaggtacacagttgagtgcaagtttagaattacagtgctatcatgtccccagcaaattttttcgtagagaataaaagtggctgtcacagatacagcacttaactggtaatgatataaggccagatgtgagtctcctttctatgatgggtcagtaaagtgtaataggcaaatggttaaaggcatgatttttgagaaccaggctacttgaggtcaaatctttactgtgggcaagtttcttaatcatgttgtgttctaatctcatttgtgaaacaaagattataataggatccacttgtagagtagttgtaaaaatggaatgaaatgcctaaagcaatgcatggcacataatccacacccaataaatgtttgctcttggtattaggtgttggatactgtcatttttgtgaacactgtcattgtctacatggatgctagatttattcacttgtgtagtcttcacccttgaattatgttagcagatttgctctttttaattttttttaagttaactcaaagacatggtttcattataaaggagtatgaaactcatgtcagtgggcttctaatggaggtatattcattcaacatcaaatttttattacctgcctactatgtgcttagcactaggctttctagttgcttgtaaggagattatgacttgattgcaaagataactgttagtaatttatgtgcgaataagagaccaaccaagtgtgaactaaccacaatgtaaaaatgtagaggcatctagtggaatgagaatagctttgacagataaaatagatgatcagaatacctaacctaggccttgaagcaagactggctacataatttgtggggcccaaatcaaaaaaagggggcatcttttgttcttaaagtatttggaattttaagacagcaacaacagagcattaaaccaagcacaggacccttctaagagtgggtcttaagacactacacatcacatgctctgccttgaaggatgggaagactcatggagcgattaccgtcattagcagagtgacactttccagactgtcagtcatgccattcacatgcctctgtgtcctttcttgtactttttctctgaagcaaaatgtttttacttactttttcaacctatgcaaaccctacctatccttcaaatcccagcttgagtctgagctcagagggaacacaatagaataaaaagagtcccagacttagaagagcaaaggtcaattctgcattccatcagctctagaactatgagcaaattctcttaacttttctcatagtgggtttgcacacatgccacacagggggatcaaaaggcatcagaaatgtaaaatagcgttgaaataataattcctcatattgacaaagagctttacaatttcctgtaaacccttccctagcttctgcaggctacaaatagctcttgctaagtgtccagtgcctgattaaaatatacatgcacacatgcacgtgagcacctctctgtccctcccaccacctctctctgcttagcatatatgatttttcttattatctcatgtaacttcttaagatcatcaggccttcagtctttaccccttccaagccacgctcctcactaagtcagtatgatctttctaacttatggttcctcactgcctagtgtaaagtttcctaaatccaatggcacagaatcagtgtcttttgaggcatttgttaatcagtgttctgggaaaagaggtgcagtttgaaaaaaagcgtcatgctatagccctctgttgtaggtttccaatgcacatgtaaaacttctgagaaatcctgcaataaaaaagttaatttaactttgttcaaatcagaatttttcatattaatttgtgcatatttacattttatacaatacctaagttctgcagaaacattttgtcaaatgctggcctgcactcaggcattctgcttgttttatagaacctctaggatctattgctaccctaggtttctagttcattttctgtcacccctttcacaaaccctatgcgcagaaacagtgggccattttcagtttcttgaagaactctgagctctgcacctgttgtgctctctgccaagaatgtctttcctgtcactcatccatccatttattccctcgtgatgtgtttctcttcactgaagacccagctcacttgctctgtaaagacatctctgacattttcagtaactactgtctcctacttccagtggttaacacctctaaagaacttcatatacaaaaatgattcctgagcattaatgaatgctttctttgtgtcagttatgtagcttttattttgatgtagacaaccatctaagatgattaaaataaggtctactttacagattaataaatgcatggattaagaaacccacttctttttctgccttttgagtggtgcccaccatcgacctagctgccccattccagaaacacagaagacattttgaaaatcttcctctaccctacatccagtcaggtgtcatgtcctataaatcccagattcctaaacaaccttaaaacctgtccataggccaggtgctgtggctcacacctgtaatcccagcactttgggaggctcaggtgggcggatcatttgaggtcaggagaccggcctggccaatacggtgaaaacccgtctctactaaaaatacaaaatgagaacacatggacacagggagggcaacatcacataccagaggctgtcagtgggtgggaggaaaggtggggagagcattaggacaaatacctaatgcatgcggggcttaaaacttagaagacaggttgataggtgcagcaaaccgccatggcacaagtatacttatttaacaaacctgcacattcagcacatgtatcccagaacttaaagtaaaattgaaaaaaaaaaaaaaaaagccgggcatggtgatgggtacctctaattccagctactcgggaggctgaggcatgagaattgcttgaacccaggaggcggagattgcagttagccaagattgcgctgctacactccagcctgggcaatagagtgagactcagtctcaaaacaacaacaataacaacaacaatctgtccatatctatccatttacgctgctactaagttagcctggatcagtatcatctcttggctgtgttcctgcggtagcttctgggcaaatattccacctccatgttaccacaagtacaatcatttcctaaagtgcagatctgatcatgccaattgccctgcttaaagttcttgagtgccttcccataactcttaggaaaggaatccaaggcccttaatacaatgtaacagatctttaaggattagctactctctgcttttcacctatattttgttattaattaggatctcatagtctacacaggaaggcttgcagagcctattgtgatttataggccttgccaaacattcttttgcctctggactttatttttatttttatttttgagacaaggtcttgctctctcacctaggctggagtgcagtggcacaatcatggctcactgaagccttgacctcataggttcaagaaatcctcccacctcagcctcctgagtagctgggaccacaggcgtgcgccaccacacccagctaatttttgtgtttttagtagaaacggggtcttcccatgttgcccaggctggtcttaaactccagggctcaagtgatccacctgcctcgatctcccaaaattctggtattacaggcatgagccaccacacctagcctgcctctggacctttgtacacactttttctacttcttgaaattctcttcattctcctcctcactctgctaattcatgagcttcctaaatgtaggtcaaggatagtgctcttcctctagggcgcatagcatcttgacatctttttctctcctgtaagctctttggggccagggctataccttaatcatgatcttatctgtacctaatatggtgccggccctagaactggcatggaatagtcatttgttgaatgcctgaatgaatcaaataatgaataaatgagtaaatgaaagcaaaactaaaaggacagcttggggtattacaagagaaggaatttagagcttcctttcacacatcctcctgcctttgtcctctatgtcaaaatacattgtcctcctttcaactccccgaaagctccatgtatgctccacctgaaaagcctttgcatctccagagtgtttcttcttcattcacccacagttaatatctctttatccttcacatttcagattagtcatcttttcaagaggaaagaattcttgctgatgcagacaagtcggccccctgccatactgctctcatagcaccaagtgtctccttcattactttcaccacagtgtagctctacatctatgtctatgaatgtttatttagcaaaagtttcctccaatactcagtaagctcatgaaagaatcatgtctgttttttattcactattggattcccagtgcctaagtactgacacacaaaagtttgttaaactgattcatgaattaaaaacagtagtttttaatctcatcagcagttttttgtttgtttcatcaccgtgtacatgcatagtagggttcagtaggtaagggctgtttgttaaatgagagactataactgatttctttccccagtttataaacagttgttaactagtaatggttgagataaaaaattttgttcctacaaatttagtaatatttgcatattttcatactattttgtaatatgtttatggcttctcttgaaataaatgtcaaaagaattccatctgcctagctcctggactccacctcattaggaaaataaagaaccacaaagtccatctccaccacaggaaaggacaatagctctaattcataaattccataatgtgtacataattggaagacatcaaaatatgtcctgtcacagaccagtccgtgattcttcaataagaaattatgaaaatcgcaaaacaaactgtccaaaggggtcattactgtttgacaattcatcgggctaaataatattgtctgagtggtcgcctggctctgtttgaccttaaacgaaggcagaggaactgagaaatacattaaagaaaggctatggtcaggcttttggagttacacaaactttgatatgtctgggaagaagtgcttttttacccccataattttaagaacagggtaggcaatgacattttaaagcctgtttacctcataatcaaatcatccacaatttgataggtgcttaccaagtaccaggtattatgcatgtctttatgctcacattaactctatctctcaccatcaccctgaaggaggtattattaactatcattgaggcaactgagactcagagacctgaactatcttagagaaagtagaacatgactgatgtggggctcaaacccactgttacttgactctactcaataatgattccacttacatttctctatgcaaatttctgttccagccttccactcagtaagtacatactaagtatttatcaaaaagaatcaaagtgccataattcccataatcatttgaaaagaacacctaaacagtcaccaggatgatttttctctcaaagaagctattcagtttgaaatgccctgtggtggtgagatcttacaaaatgataaataaacccgtagacattttgttgtttaattttttaagcccatttctttcttccttttttttttcggtgattcactttcctgttattcagaacattacacacctacacacatcaaataaaactgaatattccaagatttaaaggcgttagtgggggttgtcaatacatgaaagcagagaagctgtttagtataattggggaaaagtggaggctcagactgtcaaaaaaagatggcttttgtactttaaaactaaagttccaggatatagaagtggaccagctaagaaatgctggcttagcctcttaagaaggtaatgatcctccttgatttagaacaagcagaaaaagaaaattaaggtcaatgatgaactgagcatatatttgtcatctccttttcccaagatctctttaaaatgatagtaaagaagcaaagcagatacagccccagaacaatgaaaagaatataaagagggtcattaagtgaacgatgcatttcatgtgtttctgagagaagacaggtaagtggaggaatgatgacagattgagggcacagccaaggagggcccccatctatcttgcaaaaacctagagagagttaggatttagaaatgccaaagatgatgtgggatgaagggtgaaaaatggagcgggtgtgaaaagggatttacctgccccccgttcccactgtttaactcttctcatcacaccctgggtggatacaataaaaagttcttccttttgaaagaaaactaaaatggtctggggtggactaaggtcacaagtgtgggagttgggtcttcagagcaaagtgctctgcattttggaattagggactacaaaatacaagataatctctgtgcctactcactgtataatgaaacccaccagttggtaagtcctattcatattcatttgacagttctactgattcattctcacatatgacttggcaatggaagatcatctactcaattgagtgaaacctacactgtgaggggaaaaaagaacaagataaacaaatataaaaacatatactggagacaacagggatacttttagggccagaaataaataaataaatcctaatttgtatgtgcagaaacatttaaaaggagaataaacctacaattcaagaaccggatgctatacaaagaaggaaaacatagagaataagaaaaaaaaaacatggaattaaaaaatatggcaaatttatttttaaattattagaaggttaaaatatactggtcaaggaaatctcttaaaaagtaggaaaggccaggcgcagtggctcacgcctgtaatcccagcactttgggaggccgaggcaggtggatcacctgaggagtttgagaccagcctggccagcatggcaaaaccccgtgtctactaaaagtacaaaaattagccgggtgtggtggcaggagcctgtaatcccagatactcaggaggctgaggcaggagagtctcttgaaccagggaagcggaggttgcagtgaactgagattgcatcactgcattccagcctgggcgacaagagtgagactccatctcaaaaaaacaaacaaacaaaaaaagtaaagatcagatagttgtagatatgcagcattatttctgagggctctgttctgttccattgatctatatctctgttttggtaccagtaccatgctgttttggttactgtagccttgcagtatagtttgaagtttgacaaacctgagaaaaacaagcaatggggaaaggataccctatttaataaatggtgctgggaaaacgggctagtcacatgtagaaagctgaaactggatcccttccttacaccttatacaaaaattaattcaagatggattaaagacttgaacattagacctaaaaccataaaaaccctagaagaaaacctaggcattaccattcaggacataggcatgggcaaggacttcatgtctgaaacaccaaaagcaatggcaacaaaagccaaaattgacaaatgggatctaattaaactaaagagcttctgcacagcaaaagaaactaccatcagagtgaacaggcaacctacaaaatgggagaaaattttcccaacctactcatctgacaaagggctaatatccagaatctacaatgaactccaacaaatttacaagaaaaaaacaaacaaccccatcaaaaagtgggcgaaggacatgaacagacacttctcaaaagaagacatttatgcagccaaaaaacacatgaagaaatgctcaccatcactggccatcagagaaatgcaaatcaaaaccacaatgagataccatctcacaccagttagaatggcaatctttaaaaagtcaggaaacaacaggtgctggagaggatgtggagaaataggaacattttacactgttggtgggactgtaaactagttcaaccattgtggaagtcagtagggcgattcctcagggatctagaactagaaataccatttgacccagccatcccattactgggtatatacccaaaggactataaatcatgctgctataaagacacatgcacacgtatgtttattgcagcactattcacaatagcaaagacttggaaccaacccaagtgtccaagaatgatagactggattaagaaaatgtggcacatatacaccatggaatactatgcagccataaaaaatgatgagttcatgtcctttgtagggatgtggatgaaattggaaatcatcattctcagtaaactatcgcaagaacaaaaaaccaaacaccgcatattctcactcataggtgggaattgaacaatgagatcacatggacacaggaaggggaacatcacactctggggactgttgtggggtggggggaggggtgagggatagctttaggagatatacctaatgctaaatgatgagttaatgggtgcagcacaccagcatggaacatgtatacatatgtaactaacctgcacattgtgcacatgtaccctaaaacttaaagtataataataataaataaaaaagtaggagaaaaagataaagccaaaatatcagagatatacaaattaggaaattattctatgaagactaatatccaattaatagaagtatcaggaagaattaggaaatcaaaaataaggaaattattaaagaaatacttgaagagctatttcccaattgaataacaggagtgttcgagattaaaaggagccctttgtatacccatattggttattttaaaagatatataactacataatcattgtgaacactaaggatacaaagaagatcctaaaagtttcctggaggaaaacacaggccatatctatgttagtaactatcagattgtcactggaaaatttcttcaacattggtccctaaaaaacaatgaaatgacagcttcaaagttccatgaaagaacaactcaaacaagatttctatactcaacctaccaactgactgaatggctggggctggggaaccggaaatttattgagccatgcccttcctttgctagatgctttattgtgattattaacactcctttaaaggaagtattatttttgccatgcacagacaagatccactaataggtcgacccaaggaataagtgtcaaaaataagtgccacagtcagaaaacatacctgagccaatctgctattcttcttccagagtatatcactgggcctttgaacacacaaagacaggccagctcatagggaaaagaagatacaatgtagaaacagggagaaccatccactcctgggactttgaggcaaggttagactgttgccatatgtaaaggaacattatgtcattgttgctaccttggcaaatttcaaaggttattgttccagcttcccttccttttctttcctttctcctttcctttctccctttctttctcctttcctttcctttctttttccttcctttcttccttccttccttccttccttccttccttccttccttctttccttcttttctttcttttctttctctcttaaattttattttaagctccgggctacaggatgtgtgcaggatgtgcaggtttgttacttaggtaaatgtgtgtcacggtgatttgctgtgcccatcaacccattacctaggtattaagccgggcatgcattagctatttttcctaatgcccccctctccccgtgccccatccccatgcactggacaccccccagtgtgttattgttcccctccctgtgtttatgcgttcatttcattcagctcccacttaaaagtgtttaattttctgttcctgcattagtttgctgaggatgatggcttccagctccatccatccccctgcaaaggacatgatctcattcctttttatggctgcatagtattccatggtatatatgtaccacattttctttatccagtctgtcattgatgggcatttgggttcattccatgtctttgctattgtgaatagcagctatattttcttatgtaaacatagctaaagatattttacaaattgaggcacacccagttttgaagttgaatatgaccaagaagcttccattacagatagttaacttattggtgctaacataaaatatctgtacaaataaattcaaacagtggctcactcctgtaatcccagcactttgggaggctgatgtgggaggatcccttgagcccaggagttcaagaccagcttgggtaacatagtgagacccaggctccacaaaaaattaaaaagaaaaattagccaggtgttgtgacatgcacctatcatcccagctacttgggggactgaggtgggatgattgcttaggaggtcaaggcttcagtgagctgtgtgatcgtgtcactgcactccagcctgggtgacagagtgagaccctgcctcaaacaaacaaacaaaaaccaaaatacaaactcccctacatttccaatgctatttcaacctatctgttgaatctcattcataagctcatgaaacaaatattcattatacctgaggtcctagatgctgtgtcaacaacacaaattccctatcctcatgaagctttcagtctaggaagataatgaagagaatttggtgaaagagaagaatgcaagcaggaggaggaagatttacttggttagagtggtcaggaaaatactttccattgaggtaacaattcagtcgattcaaataatccagttatgtaatggtcggtgtgatgagtggttgcattagaaggaaatggaatagtagtgcaaacacctcaagatgggaaaatgcttggagcgttcaggaactgaaactgtgccaaagtaagtgagagaggatggccaaagatgaaattgaaaaggtaattagagccataattcacggggcctgtaggctattgtaagaaattagaagacaattcaaagtgtgatgaaaaaatctctgaagagctgaaagcacagcaaggacatgaactgatgtatggttgcatgtttgacttacctaaagacctcaccatgtgcacactccactggcatctcagaatcaacaaacacagacatcatcttccttgcccccaaagtcaccatttctttctattcctctcctctccccattccttttccaaatatttattgaaaatcaactctgtcaaaatacttcctgagtccctatagtagtcaaacagcaaaatattgtcatctcagcattgttttatttcctcacccacacacccacacaactacatcctatgaactgttctgcaaaatgtctctcaaactctgcctagttcaagcttttattacgactcatctaatataaataataatagcaataataatattgctactacccacaacaattattacaactacttctaatacaaataatgcttaccatggatcaggctttgttatatgcattttacatagattaacacatttaattgtcacaaaaatcctgaggtctggctctagatatacaactacacacggcctcgttaaagtgctcttaactggttgccttttctctgtcctctttctaatccatcctactcattttattgacagactaattgtccccacacaaagatctgatcaagccaaaagccatctgtggttccccagtgcattgagaacaacattcaaactccttaagctgataatcgtcctcccaagatctggtcctaatctatacttcccaattcagagcacacctcttctctacacataacaaagttttgctacactggaatcagtttatttctaattattttcaatgcactaattctcaaattgtggtatgagcacctctagggatccctaaaattgctttaggaggtccatagatcaaaaccattttcataatacgaagatgttatttgcttttgtaactctcattctctcatgagtgtacagcagggtttcccaggcactctgtgatatgcgatattacaacagactgcagaagcacatatgagaacctgtcttctattaagccagatgttaaagagatttataaaaaacataatgtaatgctactcttctattttgggggatatatatagtaatttttcataaaagcatgccattgatgttaatatgtaatgagtttattattgttatttttaattgaattaataaataatttaactgtcaatagacattaaccacattaattaaagaactttgaggttctcaatcatttttaaggttataaggtggtcctcagaccaaatagtttaagaaacactgttttttttgtttttgtttttgcttttgttcttttctttcttgctttctttctctttttttttttttttttttttagagacagaatttcactctgttgcccaggctagagtgcagtggtacaatcttggctcagtgcagcctctacctagcaggttcaagtaatcctttcacctcagcctcctgagtagccgggactataggtgcatgccaccacacctgtctaacttttaaatattttttgttgagatggggtttcgccatgttgcctggactggtctcaaactcctgggtttaagtaatctgccacccttggcttcccaaagtgctggaattacaggtgtgagccaccatgcccagtcaaaagaaccactgttctaatgcttaagagtacatgctttaaaatcagattgacctggagttcaaatcctagtgatactgataatttttttgaccccaggaaagttaaagttgtatcagaatactcagttttctctacagcaaaatggggataataattattgaccttacagggtaatatgagcaaaatgcttaagccagagttggcacacagtaccaaatggtgccaaatgatagattcttcccatttcatgactaacataatgatcattatattgtcatcttctaaacatgctccggggtttcctggctcagagtaattagtgatattcttgtctctgcagggattgtcctctcagagacttgtctaactactgagagccaactgtagtaggctagtatttgtagaatgcagacatcactctctctctcactcctatagaaccagaaagaccaaagtattgtatttgttcttgagtttctaactcatgaactgtaagagtctggtgcctaagaaggagaaaaaaatttttgaagatcaaaatcttgcctttaaatactgatccacagttcctaaaagtatgaaaggtcagtattctggggaagaaaaaggaaagaatgcaagtttattatataagaacattattataaaaggagaccaaagtttgaccaagtggcagaaagtaggaaatcaataggcttagtctagagattaaatatctactcagcctctcatgaggcttatcaagcccagtcctggggtaggaggtaactaatggaactagaggaaagttgtagaaaattccacaggcagtattgggagcgtgttccccgagtcctaaagtatagcccagagaggttgtaagcttcttggagaaacctcatgtctaaccaatatggtgcttgagtaatggttgtaaccactgatcatacagactggctgaagacatctgcttgaagtcctgtagcctcagtatagaatgaaagagactgctaaaagtagcttcatctccttgagagaaaagcagaaacagttaagaacacagtgatgaacccaaaggtgccaggagtcaaaatgagggcacggacatggtactggaggtcatggtaacaccacatttaacagcagcaggttaacattaacatgaggaaccagatacaaaaaagtcacacccaagccaagactgggagaaaacatatacaaaacatgtttgctaaggaacttatattcagcctatttaaaacaacttttacaaatcaataattaaaagacaacctgataaaaatgggggcaaaatatctgaacagaaattttaccaaaggatatatatgagtggcaaataagcacctgaaaatatgctcaacattattagtcattaaggaaatgaaagttaaaaccgcaatgaaataccattgcatctctactagaattgccaagactaactatgtcaagtgttggtgaggacatggagcaattgggactctcatactttgctggtgggagtggaaaatggaacactggaaaatatttgttattcccctataaaattaaacacacaccattcaatccactcctgtatatttattaggaagaaataaaaacatatctcaatctactcctctcctgcatatttattagggagaaataaaagcatgtccacacaaacatttgtacttgaatgttcttgtcttaagtttgaaatttttaaatttttaaatttttataatagagatgggatctcactatgttgaccaggctggtggtcttgaactccaggcctccagtgatcctccagccatgatctcaccttgacctcccaaaatgttgggattaaagacatgaggcactgttcctggcctgaatgttcttaacagctttatttataagccaaaaactggaacagcccaactgcccaccaactagtgaatggtatagtacatctatacaatgtaatactacttagcaattaaaaggaactcactcctattaaataccctctaaataaatctcaaaatcaatgtgataagtgaaagaagtcaaacaaaaggctaagtgcaatctgattttattcatataacattatagaaaagacaaaactatagagtcaaatggcagatcattggttgctagtgcccagtggtggtaggttgggattgatttcaaaatagcaggagtcagcttttggggatgatggaaatgttctctgtgctatccagtatggaagctcccaagccacatgtagctactgaaattttaattacatataatttaaattaaataaaatttaaatggaaataaaagttataatggaaagcttgtaagcaggattgaaacaatttggacatttgaacctattttttcagctgtgaattttataagttctaaataaaaattaagtatttctagtaaagatatattgtctgagttgagatatgttggaagtgtaaaatacacaatagacttgaaagaatggatgtgaaaaaagacataaagtagctccttaatatattcttatattgattccataacaaagtgataatatttgaatatattaagttaaagaaaatatattattaaaattaatttcacctgcttcttgtaccattttccatttatttatttatttatttatttatttatttggagacagagtttcactcttgttgcccaggctggagtgcaatggcgcgatctcggctcaccgcaacctctgcctcctgggttcaagtgattctcctgcctcagcctccctagtagctgggattacaggcatgcgccaccacgcccagctaattttgcatttttagtagagacggggtttctacatattggtcagactgatctcgaactcccgatctcaggtgatccgcctgcctcggcctcccaaagtgctgggattacaggcgtgagccaccgcacctggcctttttcttttatttttaattgacacataatgattatgcatcatcatatttatggggcacagagtgatatctcaatatatgtatctttcttctactttttggaaatgtggccactggaaaacttttaaattatgtacctggctcaccttatacgtctattgggcagtactgttctacctcatgactgtggcagtggttacaacactgtatgcccttgtcaaaacatattgaattgtacatttaaaactagcacattttttgaaatgtcaattgcactttatgcagctgattaaatttaaagagacaatctacttctaagaagaccagccgagttacactgtagcaggagacaggatgagtaacacaggaagggggcgctgcagggacagaggcctaaagggaagaccaggaaaggcaagaggctccttggctgattgtggtgaggacagaagatagcgcaggatgccattccgacagggaagtaggaaagtacaggaggcttttgtgggtgtaaaatggaatgtttagagcctaaattatcagcttaagtctgaaaacgattgtataagcatgaattggctaaattacatttttttttccatcagcagatgtagaagttaaaatctagaaataaagctgcatttttgcacaagcgagctgggggattattacaactacgtattttaagccatctatgtgcattttcctgaagctcagctcaagcagctcttctcccagagcttcttcaggacattggttaaaatgaatgtgttcccatatgagcgttcccaaagttcagcttatattcctattatggaaaatttcatgtacccaggagccaaagaaagtggaattaatgtccttacagaagggcaaagtctacaacagcatctctgtgctgcctggtcatcaccaagttggagaaagggctaagggcaggtgtacctgaacatcccccctgaggccaacccatcagctatagtgtggaacacactgtgcctcacactgtttaagttctctacttgggagaaacccccttttccattatcctgtataaatgctgttgatttgtcaaggcccagctaagtttttgtcttttcccataccactttcattttctactgctttgaaatcctacactactttactgtttagcaattgtgagttattaactattgggtcctgtgtgtttattctgtctcctcaatcaaatggtgaggttcttgggggcatgcctttcatttccatagtatgcagtggtttgttagtctttcaaactggctgatcaaatgttggcagcattgaattccctagaaggaaaaaccatgttgttcttccttattaataaatatgatcatagagaaaaactgccgagcagaacagcagcagcaatgattttatgagcatacccacagccacgttctttacattaattctcacgttttgtcttctaaatcaaactacatgatacctataaccatggttcctcaagtgactggaggtaccccagggcaccacagtgaacttacaggaaagccaagacagattttaaagttttgagggaaacacttctgtgatacaccatgcaaaatattagcttgaagtagatcacagttgcaacattagattgtactacatgacagatctttgtaaaggttggttgtgatgaaaaccaagtatggtgcaaaattcaacatggaagagaaaagtctgattccaagtttcaaggaattatgcagtactcaacaggcacacatattctactagtaagttcttggtgtttacttaaaaattaaatttttttttctttcaatatgtatatttttcaaaagactcctaaattttttgaacatacatatgtatacagctgtttgggcctagctacgtaataaagaaattgttagatttttttttttttttggcataggggtgtgttaaacaattactgagacactaagggctccattaacagaaaaagtttagcagtctgcaccctgtaaggctcacatcattgttttcaggttgtagttgaagaaggtgatgacctagagtgttgagaaacttcccaaaggccctacactagtcagtgtcagacctaggattcaattccagcttcccctcaatataaaactcatgccttctttcttcctttcccgccctcccttcctcccttcctcccttcctcccttccttccttcccacccagggttttgctatgttgcccaggctggagtgcagtgccgtgatcacggctcactgcagcctcaaactcttgggctcaagtgatcctcctgagttgcctcccgagtagctgggattacaggggtgggccctggagctcagatcgtgtttttcatcctgggtttactttaagatccttcagatcagctcctggaggcagccaccaaagagaaagcagatggtccatggagaagtaatagtgggagaagatttcccctgcagctaagagagggcagtgggaggtcacagaaagtagcagggtgagtgaccttgactgtttctgaccaccagctattaccacaacataaatttacactgaggaattaagagactaactaggggttccatggggagctcatccatcctcctagaccatgacattcccccacactaacatcagagggaagagtgggtaacttatcagtaagtagagcagttcttgaattcagttcatttgcttctgggatattcttggatttttattccaaccccaatacacttcaaagaatgacaatgtgacccttttcttgtcctaatgatctgggagcattttcctcaccattatgcacatgttactaccctcttaagaggtcagtaaagctcttcatttcaaaacctgatttatttgcattcataatctccctgttagctaggcaatctgcataataacctggcatgaaatatttttaaccaggctttccaaaatatagaaagaagccttcctaataatggaaggcattcactatcttaaactggaatccatttacagattaaatttgccaagaggtcagcttgcagctgccactgtgttgcaagcccgcatgtcctctgtgtcacatcctgtgacatatcttgagaagagtcagggtcttttccagtctgctggttctgtgtttcaattagaatagatttaagagtccccaagctctggtttctaggtggctttgcacaatattattaataattcaatcatacctatgctgataacagattacatttctaccatcccacaaaaaagcccaaacagattaaggactacccctatggctaatttctttagcagtttcatatctgattgacatccatttatctaattgcagctagaagatttaatttccatttcattggcttaaaattaataggaaaaacctgtttactttttaaatatttgactcatcctttctcatctcctgaataatgttgagatagtccattctatgggatggattctacaacttatcagttttcattctctgaattcatttcaggcaagcctagctatttacaatttgaagtctaacataaaatttaatctttcattgcaagtaatttcatttttcacgagcctaataacaagaaggtagcagggtgttcatttagaatttcaaaaaattttgcagatagaaaaaaatttgaaggctatacagctatggatgcaaaagctagtttgatcatttatgagctacaatgcccagaataggttacttaactcagatttgagacaaggatgagacaagtgtagtgcctcaagtgcaagatttaaaggaagtgctcactcttggtgttatgcaaggttgggagagcacatgtacaaacatgcagtgaatacctttatccttaaattttgtgccatatgattgttgcttcctttactctagtcctgggaagatctctgaccattagttgcctcatctgcaaaagggtgatggtaatagcaaccttcttcatggtggtgtagtaaggataaaataaaataattcacttaagcacttagaatattgcctggtacatagtaagcacttaataaatgctccatgatgttactgttaataatacattacattgtattgtacaatttgatcatgttacctatagtctttcagaagtttcttacttttttaagaaaatgtataaaatcatatttttaaaaagaatatagtataaaatcattagcatgtcccccaaacctagcataatctgactccatgtacttttctgtcaatatcttctaaagctctccctgaatatcccactggtcttcctttgggttcttaaataatttatgttccatattcgtctacctgtcacagggcttctacataggctgttcccagtctaaaattcttttccatcccttttcatatagttaactctgcctcatcttttatatcatagttcaatcatcatttccttagggcccagatcagattgtctgttagacactttctttttttttttttgagatggagtcttgttttgtcccccaagttggagtgcagtagtgtgatctcagctcactgcaatctctgcctcctgagttcaagcaaagctcctgcctcagcctcctgagtagctgagacaacaggtgcacaccaccatgtccggctaatttttgtatttttagtagagacggggtttcgccatatcggccaggctggtcttgaactcctgaccttgtgatcctcccacctcagcctcccaaagtgctaggattacaggggtaagccacggtggccagcctcttgacttttaaaataaatcacagttggtacttatggatttatttttctgattattggattactttctctctatgccactagatgctaagttagttccaagagagcagagacctttctgctttggttggcaatttatcctcaccacagtagcctgcaatcagtaggtgcacaataagtaattgtttaaagaaggatataaaaataatattgccactggctatcctagccagggacgaggaagacacttcttcacatgggagactattgccttttggattaagagttcttactgcttgtcttcctcatagtgaacccaaatacctcttccctctatatggccacacctaggtccaattttatttcataagcaaccactttctttgaacattttattagttcacaaatacttgtcaagtgcctagaatgtgtagcacactaggtttagttgggtatatacaatgaataaaggtacacttcctatacttagggttttttcagcacagtggaggacgaatcacatgcacaaagctctgatttaagaaagtgtagagtgtatattcagttccctaagaggccaggtgcagtggcccacgcctgtaatcccagcactttgggaggctgaggcgggcagattgcctgagctcaggagttcgcgaccagcctgggcaacaaggtgaaaccctgtctctactaaaatacaaaaaagttagccgggcatggcggcatgtgcctgtagtcccagctacttgggaggctgaggcagaagaactgcttgaacctcggaggtggaggttgcagtgagccgagatcgcgccactgcactccagcctgggtgatagagtgaggctccgtctcaaaaaaaaaaaaaaaaaaaaaaagttccctaagagaggtacagcataccctaaagagagtgaccttatcatctgaggaatcagtggccacttcctgaatgaggagattttctgaggtaacatctgaagaatgagtgggaggtatacacatgaagagtagtggggagagagtgagcattctgaaagaaagaatagaggggggatatttaggcattctgcatacttgcagagttgacatatccacgatctcttgttctttcaacttttcttttttctttttttttttttgtttttgagacagagtctccctctgtcgcccaggctggagtgcagtggcacgatctcggctcaccacaacctgggttcaagcaattctcctgccttggcctcctgagtagctgggattacaggcgtgtgccaccatgcctggctaatttttttttgtatttttagtagagacggggtttcacaatattggtcaggctggtcttgaactcctgaccttgtgatccgctcgcttcggcctcccaaagtgctgggattacagacgtgagccaccgcacccggcctctttcaacttttgattcattcattcatctgcttattaattcataacaaacaccaagtaagtctcttcaatgtgtcaagtactaccgtcatatggaaaaaagactagtccaagctcttctggggattatatgctggtaagttcaaatcctatctatagccaagaaactctcacctaacttgcagaaaatgttgttaaaaacactatgtgttcagccctgtaggcagatacttgcctaatgctttatttcaggcttttttggaatgcagctgtcctctggaggccctgtctgcccatgcaggtaagatgttctgaaggcaagaatgagtttatattcggcggaaatagtctatttcctgtgattttagaagcatagagtcaagtgcttaaaacagaaacagtgccaaataaatgtttgtccttgttattattattgcctcttcaggatggtaggagaaggcagagggaaaggattgatgctttggaagaggtagtcttcacacgcagccatcccatgtttaagaaaggcagggaggactccaagggtcttactctctcccattacagtgtctggccatcttagcccacactttcaaagtagccctacatccaaggcagaaacatgcaaggaagttctatgcttagtaaaaattgaaagaaatagaggccaacatatagttccagtaatgactgaaattctatttatattctaggcctctttactttttgattttctcattttcaatgttttttttttcaaacatcacattaaaacagctcactcggtctcttgatctccactttgcctttagctgaggaccccacaagacatggttcttggtttgtatgctcatctttattttgaaaaacataaactgaattgagagatgcaaaatttgaggaacgctctctaataccataaatatacattgattgctgcccaatcattcaactttaaggactaaaagctaaactcttaaatcctttagtgaattaaactgcaaaaagggatacttaaaggtgatgggactatttactccccatttacctcctacgtcctactaaaatggacctagctcagtgcttttcacttactacttacgtggtctttggtaggatttttgttctggccaacccaacttcaaatctatgaggttataaggaatcagcaaacaaaatgacatatggtggagagcaggtggctttgagaggcaatattaactatgtatatatgaaatcacaacaactataaatatttaatttccaatgtttgaaagagaaaagagggtttctttgaaagtggacttagtgcatatgtaaattaattacaattcatgacattcattatttcagaaaatgatgcaataatttaaaaccaatattgacagtttgaatgttacaatacttttaaagatttattgccatacattttcttttcccgttaaagaagaccttctattatgagcaagatgaaatgcaaaatagaggccacatgctttctgcttgtcaagcttgtgtaacttggactcagaggagaacatccatggggtcctttgggaagcagtggttagggtggtggcagtttacacaattgtcccactgcactgcatcctggtacgtcattacaacctatgtaaagatcacctccaaaattaatgatttgtatgctttcctgggcaccattctaatctctggtgatcttcaactttagtatgcatctgtatcaacaaatttgatctcctgacataatcagcttttaaaagcacttaaaatctgggaaccaattaggcattcatatggtgtaaaggagctattgctgcaaaaaaatgttgttggccaggttggccctaatttgaggatgagacatgagtagatggggacactggcaaagaataaaggtcatatgttgatgaataagtatagggttgggttttatgaacaaagccatttctttggctacataatgtagacagcagatttggtagcccaaatggaagatccaagacctagtgggagttggcatatcttgtgtggtacaatttagggccagggtacttaaagtctttctctagctcaaatgtatctcccctactagtcctccactttcagtattcgaatcgacagtggcttccaaaaaggtcattttcataaagatgttctggttaaaatgcacacattagagagctaaaaaatcaagatgttgttttttctcttttcttttattctccatatcaaatttaacagaagattcaaggttttatgtactacattgctctcagatatatccttatctatcttcactactaccagtctggtccaagccaccatcatctttcatctgggcttggtaacagcctcctcactggttttcttacatctaattttgcctcttgaaatttgctgtactctgccaagtagccaggaaaaaatttttaaaataaatgtgaatcagatcatgtcattcttctacttaaaatcctccaatgtctgccacttggattcggagaaaaattcaaattgctcaccctggcattcaatgcaaaacattcttcttacagccctttgcatgcccagctctctctcattcatacatcatcttcccctcctactcaataaatccaaagaagtcattctacctatgtacacacacacacacacacacacacacgtacacatgtgtgcaatttacatacccctcccccactgctattccttcataacaattgccactatgtgaaattttagcactccaggcattcagccctctgtcctgaagatgttgttcctttaccctaagtttagctgtcacactcaggtgcagagttagagaaagaaacataatatttccttaacgactgactcatagattcactggcctttgttcctttccaggttaccattctatttggtttatatattatgctgcattctgagccactacaacaaaaatcactgttattgggcccttctcctctgcccaaattcttgtgcttgcctcctccttgctaatatttaaaaatcattaaccaagacaaaaaaaatcaatttcaacactgttacaacatctttgtcttctcatccttttttgcaatgaaactcttttaagaaaacttactgcctcattactctgaattctcaccctccaggggtgatggaaaagtcatgtttttagaaaccggacttgtaagacacgtgactttcactttggggtgagttatgtttcccattaaactaaaagctccttgaagacaatacattagtatagcatctctaaagaaaataaaaaattgtatcactttgaagaggtttgtacagcatctgacccacggtttgtacttaaatatctgttttgaaacaccacattacccacaacaaaaaaatgcaaagggttagtacttttaaaaggcatttcaatttttgagttattcaagttcttttcatcccagaagagtgaaaaaaaagaaaattctaaccacatgttaccaccgttttttttttttttgacgactcagaggaagttctatctctttgagtatatagtaggtctcattatatatttaatcaaatgatttcaagtatgaatgctgggcagagagtgacagagagaactaaagcaggtgactttccttcattcttctttatctgtcttggttgctattgtactcctacagccaaactcaatatctgacacgtgactggcacctgaggtatgtgaaataaatgaatgaatgcatgcagctaatacatgacagagtattccaagccaggtttttttctgattaaaaacccgtatcccacaactaaactgtattgacttccctcatccatctgagtgagtccatactcactcagctccaaacagtagctccagattcttgctatgtagttgagtgtttaatgtttaatctgtagactatgccagaatagcaactctacaggtgaaaagctcagtagtttcaattttgtgacttgtagtaagaaaaaaagttgggcactgaattaaacatttatttagaaaattaaattgaaccagtttgcatatcatggcagccactgatatagctctgcctcttaatagctgtgtaacttttgataagttacttaacatcttaatcatgaatttgctcatctaaaaattacttatacaaatataagtaattaccaaaggtatttttgtgagaagtaagaaaacgaaggtaaagtacataatgtgtggcatgtaatcaggccttaagtgaaggttatagcaattattacaaataatccctatattataggaattatttgggtttctgaaaaggtggctgggcagaaaagatgaacaatctcttcctttgagtctatttgctgatttaaatttagtggcaaaagcaagctgcatcatagttgctcctgtaataaccagcgacatgggctctacaccctgcctgcacaggctgtctttgctgtgcactataaagcctttgccaggcccaatacagtgtgaggcacacagtgggtgctcaagaaatgcttgtgttttccgatgccactttttgatccttgctatataccctcctcgactgccattatctatgtttgtgcttttgtcaccaagcgcctacctcagtaaaaggtcattccttgtacagcattatatatgagcctcagagccaaaaaaatgtttattctgctcattggtgtctatcaatttaagaaatccattttataaataaggatcttcatttatatagaggttcaaagttatgcccaagggcacacaattaatggtagagttggttctagaacctaattgacttggtcccttcacattttttataaataaggtgggttacaaataaataaatatgtatcttctgcctcccagttaatattctaataccacagtggctggcaaaatcaacctcttcaattctttagttcaatcttatttcataatctatctgtagcaagatctgaggtgaagcaatgtgagcagtctaatgaacttagaaatgatacattttgctttcctcaccttttactgagtcctgttgttttatttgctactcaaggatgcgaagtatctgtttaacagtaaagtgccaagcaatctgacatctcctcctgattaaaacagagtcatctcaaatacagatggatacatgtcattatgcaagctatctgcttttcagagctgctgcctcaaacttcctgcagtaagatgccccctcacactccctgcagtcccccatccctggcactggctttccttgaaaacatataatcttgtctacctgcatttttgtatgtttaggctcaagcaaagaatccattatgaaaatgacagaactgccagaaagaattatgacttcactgcttaacaagctgtgaattcactgtggaggtagcaaggcagagaagcaaagaaacaggaggaagaatatatatgaagggaaactcgccttgggctctgcactactgcaagttgagaatggttttcccagcctttcaggatttccatgtttgctccaccacaaactacctaagtttctttccatagtatggggcaggatttttgccttttacctaaagttggtaatacttagaatgatgaagttgatgataatggcagcttgcatttattgagaggtaaataggtactaatagtaggctaagcatttgtgaatattattttattcaatattcacaacttctctatatagccctctcatttaaatcctttaaggacttcccattgcctttaggataaagtccaaatgttttaacatagtttatgagactctctgagattccacaaacttttgcctctctctcaacctcatctaataccactctgcccctttctggatgggtctggtctcatctatacttttggttcttcctgtgtttatactttgtcttgccaataggcctttaaatatattcccttgtaaccacatttctcccactagtcacctgattatctcatacctccctttaagaccttactattttttttcctgaagaggctatctccagttttccctgttgtttgcttccaaggttaaaaaagaggaaaaactcttttgtaactcaatacttgaaatgactatttaaattgcaccttttctgctagatttaacctctacgaaggctgacaccgtgtctactaattcacagttgtttcactagcctctagctgaatgcctgacacgagtagactttgaataaataattagaaatcaattatatgcaaaacctatatatgaaagttcccatttcctagatgaggaaacaggttaagaggagttaaataacttgcccaaagacataattagcatatggtgaagccaagctttgaatcaaagactgatgtcaaaacccatgttcacaattactctacagcactgtcttctcaaaattccctccagctatcacaggaaaaataaagaatatttctacaggatatttgtcttagagaaaaatttagtagaaaaagctcccaggattcagggaggtgatctttttcccaactaatttcagagctacataaaagaagctcagtgatttaatatctttctgcaccctgggcctgatggtttacctccccaaaatctggtttctgtttctcaactataggtggtagtggataacaggcaacctatagctacagctgttagtccttcccacagatcaacatgcaaaagagaaagtgagtttctcacattctgagagagatgttgcccaggcaacaaagacaaagccagagcaacagaccacccagctgagacaggctctgtcttccgcacattctcccataccagcgcccacttctgtggggcagcagatgactatgttcatacacccttttaatggggtgcccctgaaggactcacctgccacaactggacacagttggcaaagacatctccatggacagcccaaacaatagctccagattcttgctatgtagttgagtgtttaatgtttaatctgtagactatgccagaatagcaactttacaggtgaaaagctcagtagtttcaattttgtgacttgtaataagaaaaatagttgggcactgaattaaacgtttatttagaaaattaattaaaccagtttgcgtatcatggcagccactgatatagctctgcctcttaatagttgtgtaacttttgataagttacttaatatcttaatcatgaatttgctcatctaaaaaatgggcttacaaatataagtaattaccaaagatatctttgtgagaagtgagaaaacaaaggtaaactgcataatatgtggcacataatcaggccgtacatgaaggttatagtaattattacaaataatccctacattataggaattatttgggtttctgaaaaggtggctgggcagaaaagatgaacaatctcttcctttgagtctatttgctagtttaaatttagtggcaaaagcaagttgcatcatagttgctcccgtaataactagtgacatgggctctacaccctgcctggcacaggctgtctttgctgtgtgctataaagcccttaccaggcccaatacagtgagaggcacacagtgggtgctcaagaaatgcttgttgaggctgtcaaccatgggccgtgcaggcagtttaaagcacagtaggcatctggatctttaaaggaaattgtaccgttctaagagtcattaaatgagttcttcagggagggcagtaacaatatgccacctgattgctttgttcagaagtgctttccgactgagttaacctactaaagatgctgttctttgctacataacttcatgactgccagtccctgctaggaagtggcttttcatgatggcttgctggtacgtgtgtacatggaaggaagaggctggctacgggggagagagccccagagcagaatgaagctcctgccaacctgttccagcacactgctccagcacactgttgtgtccttttatgctgtgtgtgtgtgtgtttgttttgtaggggagtgggtgggtacgtctgcagtatcccctacgtttgaaaaacaggtctgaatctcatagaattctgttagaaaatcattcctcaagcataacttaattttctgaaagtattttatcctttgaccaccaaaacctctttggagagaattaaaatggaaaaatgtgttaagtaagtacatctctaaattaaaccatttctgcctgggcagaccaaattagtcttttctagggtgcagggtacagtatgttgtctctggtctttgttcttcagtaaaagacttcagagggaaaaactattctagagtgaataacctccaaatgttaattttgcaaaactaatactagtgactcattaatatttgtaaatcatctagattttgctattttgaaaaaccccataaagtgctaattaataaaagatatcatgtcttattaatgttcacatagtaattaccaaaatcacaaattcatctgctaagtagtcagcaaacaagacaaatgactgtgctcagctgaacagattatcaaatgcctttgggagtacaacctgatagccccaactaaaccatgaatcaagcagctactccttttgccacatggacaggcaacaacaatttcatctctcatgtgaggtgggacagagcagtggagacatccagcaactcgcattccctagagcacacgtgcttatgcaagtgtcagcattgctcgtgtatctttctcttacaagcttttactgacacttaagatttcgtttcttagagagacatgagaaaagactcaaaagatgtcacctaaagttaaacataatcctgctagcttctgcatgtaaaatacatattggtgagccttctcagctctcaaaatggagaagaaatttcatcttcctgtgaacttctatatcagttcatctctgcttctctgtatcagttcatctctgtttctcttctgacactcattacctgtacacattccacacctcctcccctagaaaggcatcttaagaacagagaccatgtctcactagccattcaagtataacaacaagtactactactattaattatttagatgcctaccatttcttatggctataaatgtgcaagtcacttggatgagtgctttaatttatttaacttttatttcttcttgtcatttaatatttacaacagccacttaaggtaggtatatcttcactttaccatgaggcaaatgaggctcagagaggctgagtgacagaactgggattcatccctaggtctgaaagattctaaagcctttgctaaactgtatgctaaactgtacctatgctaaactgtacctatccaatatggtgcctagttgagggttaagtacatagcagacattgataaatattggtagaatgaatgaataccttaatatcaattagcttctgcatccccttggtggttaagattaaacctttgcagtttctacttttctgttttcttccaagtgtgcatgatatcaaggattattgttagtactgtgtatcaaaatgaaagctcaccttaccttttttatatcagaaaataaacacctctccaggactctccctcctagctcagagactgccgggatgatattcactattggacacatttgatggcttttcatttgtattggtgttactcacatgttggactgtaagctagatggtaggaagcagcctagtgttcttggcatctcctcccagctctcttcaacatcctagactccacagcacatggggcggggagctcagggtctggtggccactgacttcacaatagtcaatgtttcctaatggtgggataataggcttttgctagtttaaccctctcagcacatagcattctcccactatcctggtaacagtacctttacccatatagcccatgtgcttggaggaagtacaccctactctcagttctagagtagaactctgggtggtttaagcccatcagcacatcccattggctttgctgcagtgatcagttaaaatcagaagactcagttcaggccagtgagaaacaaggaggtgtttgctggggcttctgggaaaaaatgcttcctggctcagagaactacgagggaagaggttctctctccctgttggagattcatgtagaacaataaagatccggaagatagtggaaataattttggaagtgtaatggaattcagctttaggagtaagcgagatgtcataggaagccaagaagaaaaatggaaaaaagtatttcatttgatgacataggtgagccatgtaatcaagccttgctccaaagctttgacagctccaggtttttccgctacatgagagtctaaatttctttttttgtttagccggttttgagccagattttctctgacttgacactaaaagattctcaatatatctaggtgacaactttgattgtttcatgctcatcctcatatttactcttctttttccagaaaaacaagtatgacagaggtctgaaggaccagaggggaccacttattagctcatcacaaacttgaaacaggcaaaatgtacctgtcagagcctaagtagaactggattgcatgatgtatggcagtgatcttccagagcgctctcaagtgtgtttgacacgagtgaactgtgttcgagttgattctccctatggcagtcccaaagcctaattatgaaaacacgataagatcattgcacagttagaccattgcaccattggcattcctaataaacagatcagcttagcccagcacgatccctagtgggtttgtcggaagcccttcttgggtttcacaaatactaaacattttcaaaggaattagtgaatggtaggagtgcaaattaattcagccattattgaagacagtgtggcaattcctcaaagacctaaaatcagaaataccatttgacccagcaatcccattactgggtatatacccaaaagaatatacatcattctatcataaaagacacatgcacacatatgtttattgcagcactattcacaatagcaaacacatgaaatccacccaaaggcccatcagtgatagactggataaagaaaatatggtacatatacaccgtggactactatgcagccacaggaaagaagaaatggtagtttgttcctttgcagggacatagatggacctggaggccattatccttaccaaactaacacaggaacagaaaaccaagtacagcatgttctcataagtgggagctaaatgatgaaaacatatggacacatagaggggaacaacacacactggggccttttggaggatgaagggtggaaggagggagaggatcaggaaaaataactaatgggtactaggcttaatgcctgggagatgaaataatctgtacaacaaatccccatgacacaagtttatctatgtaacaaacctgcacttgtacctgtgaacttaaaataaaagttaaagaaaatatcagctacttagataatgatgttcttctctgacacccctgtgctgtctttgcttacaaggacaactgcaactgaaaagcacaaagtcagcacaaataagagaattacaggtttcaatgcaaaaccatcttcaccaaagtataatggtagctgcctgaagttgaagtaacagcttggatctggtctcttggacttctgattgtgaaggatgggcccttcccaagtactggagattttaagtacaaggataagaaaggacaggacaacaggagtcaccaaagggggttatccagagagtgagaaaatgggatacagtagcctcttgctttttattagggccagcttcatagatgaacaacttgtgcagtcacacaggaccctgtggtcagaagggcctccttgtttaggtttatgatctgctttcaccatcctgaaatttgaaatactttttgaataagggaccataacttttcattttgctttgtgtccagaattatgtaggccatcctgcttgttatagatttttatttccctctttactaaaaatcacaaggagcaaaaagaatgtgttagtttgctgagaatgatggtttccagcttcatccatgtccctgcaaaggacatcaactcatccttttttatggctgcatagtattccacggtgtatatgtgctacattttctttatccagtctatcactgatgggcatttgggttggttcaccatatgcgttttaatgtatcatgatcttcttttggttaacagtaatttaactccagaaaatacaagaagtttgctccaatatactgccattccctcttccctcctttgtgctattactgtcctatatattaaatctatacatgttacaaacccaacactacagtgttaaaattattgtttcacacagtcctatgtcttttaaagaaattgggaaaaaggagaaaaaatatattttatggaatcttttatactaacatagttatcatttacagtgctcttcattttttcctgtggatttgtgctatcatagagtaccatttccggaaggccttccttcctttggtacatcttttaaaacagggctgctagcaatacatttgctcagtctctgtttatccaaaaatgtccttattttgccctcatttttgaaggatagttttgttagatacagaattcttgtttgacattattttctttttgcagtatggatgtgctattcttcttccttctggcatccatggttttagatgagaagccagcttaattgcatggatgctcacctttctatggtgcgtgctattcttcttgctgctttcaagattttctctttggatttggcatacaacagtttgacaatgatgtgttcaagtgtggatctatttgtatttatcctgcttgggtttctttgagcttcttgggtgtatagattaattttctaaaaaatcaaattttggaagttttggccattattttttcaaataggttttctgtccctttctcttctctccttccgacattcccctgacatggttgtttctgtgcttgagcttgtcccacaggtttttgagggcctgttaattttactgcagtctgttttctcaccattctctagattgagtaatttctattgatttatagttcactgattccttgtctctcaaatctgttgttgaactctctagtgaaaaattttaaattaccattattgtacccttcagctacagaattttcacctggtatttttaaaataaattcaatatccttattaagaatctatttgttgatctcttgttaccccacttttctttaattctttaaacatggcttgctttagttctttggaaatatttataatagctgccttgaaatttttgtccacgaatatttggtaacacagagtttctattaactgtttttcttttcttgagtatgggtaacacttttttttcttaaaaatgggacatttaagataacacattgcaacgactctgaattctgatattttttttccctttatggtggttgttgctggtattttgtttgtaactttcctggactaaatctgtgaaatctgtttcccctaggctactaatgcctatgctagtctaaaatatatatacattcctgattttatttatttatttatttatttactttttttttgttttcgagacggagtcttgctgtgtcacccaggcagtgcagtggtgcaatgtcagctcactgcaagctccgcctctcgggtttatgccattctcctgcctcagcctcctgagtagctgggaccacaggctccgattttatttttaaacttggcttgctagaggttgctcctgtgtctgtatagccttagtggtcagctaatgattgaacatcatttatgttcaaacaccttaaaccactaagatttccatcctttgccctttttcacctattttcaggtagaggagcatatacaaagttcaggctcttttcaagctcccctgagtctgatatctgctggacctttttgagtctcctatgcacatgcattgagactttgggtaaaccagaagcatataaagggcttctgtctcttcagtctccactgcccatatgcacagcctcagccagcaatatgctgtctctgatcacaactgcaacttcaggctgatggagctgatggccctcccaactcactcccatccaagatgatcatttctattgacaactttgcttggtgtctgcactgcccagctcttcaaactggttgagtctccttcaacatctacagagaagctactggtcatcatggcttgctgtaccttggcagaacctataggctgggttgaggtggatgagaggagccctaggtcagaacatctcagattcccagtgttcctgagtgatgtcccatgatttttaaaaaataaacacgtctcaggttgtcataggcctttggctgatttccagagcacaaatagttgaagtttccaactttgcacagctctatcattgcattttgggaagaggatttacccaacctcctcctagagtcatagctaaaagtccactctttgccttgggttttgactcgtctctctcttcttccttcattttcccctttcacacacttaagtccaacacttgctagtggctctagagcaataaaatctttcttgcacatataagataacttcagcaacagattatatagtactattgatataaaccacgcagattaacttgcggcaagtaaaagcattcagtgaactctctaaacaccgcttgccatctatccttaggcttgtggcctttcctgcaggcaaggagtggtggatatctgatgctgcctgcatgctgttacacctgtcacaactctagcacacatcactaaatgactgcaactttcttccccactaaccctagacatggtctcagaatcttcctcagacagaactccaggcagccattatatggatcagaagatgagaccttgtagccatactttcttctttttttttttttttagatggagtctcactctgtcacccaggctggagtgcagtggtgtgatctcggctgactgcaacctctgcctcctgggttcaagcgattctcctgcctactctctcctgttccctgagtagccgggattacaggcacctgccaccatgcctggctaatttttgtatttttagtagagacggggtttcaccatgttggccaggctggtctccaactcctgacctcgtgatccacccgccttggcctcccaaagtgctgggattacaggcctgagccaccacacctgaccaccttcaagtccccaaagctgaaatgtataattcatcgcactatctgctgtgcttccacatatcagtcaaggcttggggttggtttcctgaggaacatgtctttttttacttgtgcctcaagctcagctcctgtgacagtttttcttctgaacctttgcacttattcctttggtgatttcatcgattttcatgattttaaatcccatccatttattggccctttttaggtttatatatatatttttttagatcagatctctcccccaaactccaactctctacatgccatctccacttggaaatctaaaggacacctctaagtcaccatacccaaaactgaactgttcccacctggggcctcttccacctataggctttttccatcttgattgatattaatttatctgctcagatgctcagaccaaaaaaaaaatcaagttattcttaattctcttcattctctctcataccatcaggaaattctgctggttttactttaaaaatgaatcagaaccctgtgccttcttaccacggtcactgctaccatcctagtctgagaaataccatctttcacaggactattgcaactggttttactacttctaactttgatctctcatattccatactcaacatggcacccagagtgatccttaaaccctggtatactatactcagcatcgtagccagaaagatcattttgaaaaatgaagctgatcatatcagttttctactcaaaacattctggtggcttcccattttgcttagggaaaaagccaaaggcttttcagtgacttacaatactcttcatagtctgtcttgccaccttcttcaattcactcatctttcactacactgcctcttactcctttccagccttgctggcatccttaatgcttccggaaaacatgatactggctttttggagcctttgcattggctattttcttttcctgaaatcctctttcttcaaatatccaagtgactaattctctcacttccttcaagtctttgctcagatatcaccttctcaatgacgcccaccctgtatttataattgcaaaccctatccttcccatctgtgtgtccccactgcccgcctacctctctcttcttccacatccctctcactcattcccacatttctgttcttttcacagcatattactttctactatatgatttacttatttcctatccttaatgtttgtcatctgtctcctccttctctagaacgtaactcaaaatgggtggggacttttgttcagtgacatatcatttcacagtttctagaaatgtgcctggcatgtaatagacattcaaaaaacatctgttgaacgaacaagtcagcagtggttctatggttctgatatagttttagaaaacatgcaccaaatgtgagaacactttccaaagaaatgtcaggaggagcataggtaaaagaaatgtcaatagactccatgaaaaagaagagtccatggcaaaaagaaaaaaagaaaaaaattgattgggaaatgatggatataatatacttatcttggtcaatcatggggtacattagcatagtaaaagttatgagaagtcctacaggaaaaaaatgggcttaattttattatttaaaaaaagaattcaacacaagctcaaacttcaaaaaaaagatctctatattacattgtataaataaaataagcagcagttttgcgtgtgggctctggagatagactactagggtttatatcttggcttgccatttacaagagttatttgatatctctaagcctctgctcttttatctgtaaaataaggtagtatgtatattacaggtttggggttagaattaagataatataagtaaagagggcctaatacatagtaagaactcccacaattttacaaattaaacaatgatataaatgcctgtgatctgccagttattatccttgattctggggatacagattagaaatcggtccctggtctcacagaatttatgttctgtaggcagaagacagactagaaacgcataaaccaatagatgaacattttctgatagtggcactattatgaagaaaataaatcagggttatgtgatagaaagagtggaatggagggccgctttagattgaatagtccagaaggattttcagaggagtggttgcttatactgagagctggtcagtgaggatccagtcaagcaagggtctctctggagggacagcagcacaggcagaaggaacaacaaggacagatgtgtcaagggaggaataagcttggcttgctcaggattagataaaaagtccatgtggctggtcatgtggagtgctggagaaaaatagcattttttgtagctctaaataacactaacccctctgggtctttatttgtgggatgacttttcaatttataattctttcttgggggaaagaagagaggccctggagggattgtggcaatggcccagtggtctggatgggaagagagaggcaatgatcacagttctacaattcagggagaattgactagcctgttttgaacaggcttcccaggttaaggtggtaatcttttctctccaccattcacaaaaagggcagtggggttaggtggacatgaagtgtcaactcagaggataagggaatatgaattaaaaatgcagaagaaaaagcttgtacctgggactcattgacattgtggtttctcttgaaccctgatgctctcattcttgttgaagcctaagctcatttctctttgtcgatattagaattttatgtctaaaatttcttttttatgtattctcattccacctttctctttttggaatgcagagactagtctcttggaaatagctaaacatccaggagaatgcttagcaaataccacatggtattacttttaacttgcaaaagcttaattgctcaccatattataataaagatcccctcacgtgtccagtgaatgtaaattctcactggtgttccagctagttgcctgaatattttgtttgctattgtgccaaagataattttttttttagtgctcttctatactctatagttctatactctatacttctatagttgagctcttctatgctcaactatagttgaaaggaggagaaagtgatatctctgtaacgcaagccagaaccttccgcaataatacattggcaagtggtaatgtgatgaaaatgttttaggtttaagatgtttcccatcttagtgtttctgagtgcagatccaatctgcttgttattcttctgctacacaatgggaaatggaggtaagaagattgctgacctccctgcagctttgagacaaaatttcttgactgctagctcacaataggccttcttggaactgtccggaaatagcaccctctctcaataatctcttctttctaaatgggcagtgctgttttgatcaacttaaccccagtcaagggtaccctatagcaccaattcaaagattcaagggttgactgtttgcttatcgagatttactcagatgtcatcttccttccttcttggcttttgaggcatttcattattcctagcaactctagtcgagggtaaacaagaggcactgggaataaaattgaagtcacttttagcttcttattagcaggtatgggaaaaacctggggataagttgggtgggtggtagaaaggactgaaattgtccaaagtgaggtttgagaaatatctatgtgttctaattagccccaccttagctttttctttccataacatagtttacagtgagttgactataaatggaaaacacttcttaattctcttaacaattaataaagaagttactttcctatataatgtagaagactaatttaaaagagaattgtgtgtgagtgcacgcatggcatatgtgtggatgcatgcacatgtgtgagtgaatggattcccccaacctccagcagcatatccatgtctggtcatcagcaataatctgaaatatttcctgttattcttcctgaaacaccaggagaatttcaaactctttgaaccttccttagtatgtttgaactgaatcgtttagattggcccacccattcattcagtaactatttacaaacatcactcccttttatttgtttgttttccttaaattaggtcaaagtcatctccagggaactgggattcttgaattcaaggcctattgtatttaaggtttatcaaggtatcagcctgtccctcagctttctatcctggtttgaaaggataatttgaattaccaaagatattaaattgatatggtttggctgtgtccccacccaaatctcatcttgaatggtagttcccataatccccacatgtcgtgggagggtcccagtgggaggtaattaaatcatgggtgtggttacccctatactgctgttcttgtgatagtgagttctcaggaggtctcatggttttaaaaggagcttttcccctttttgcttggcactttttcttgtctgctgccacgtaagacaggcctttgcttctcctttgccttctgccatgactgtgaggcctccccagccatgtggaactgtgagtccactaaacttctttcctttataaattatatttcctttacaaagtgttgggtatgtctttattagcagcatgagaacagactaacaaacagatctttggacaatagattccatgaagagactgaagactctagtggcccaggtggctgaatcttctcctagctttcttcttctttatatacatcccatttgtgatcatgataaacaaggtcaaagagcagtgagaaaaggaaaactaaccacctagtatatgcagagagatatcaaatgctgaagtagatcaagaagacttccttgagcaagggggcagaggagaaagctatatctagcagagatattacagctgtggaggtatcaaagaagctttgagaatctggaaggacagcccaggaaactgtttctttacctgtaccagcactaagcatgctaaaatattcacgtgggaattatatcatatgctgttttaattaaagctggttgtattcaaccttggaattgtaactaattctgtttgctctttgagaaattcttatatatatttttaatatcctttgcttcagcagctgagatttcaagtaacagggattggaaaataatcccatgtgtttccaaccagatgaattttttggttgtaaagttatttcctaagattttttttcaattaacatattagatccttgaggaatatcctggataaacgcccaagttgctctttggttaagtagaatagcacaaagtctgtatccagggaacccaatcctctgattacagagcaggtcaaagctgcaccttaattatttctttaaaaaatcaaaagattttgaaaatgattattagggagtttttattcccattctctctcagataagtattttgtctatgacacctgattcttgagaaaaaaacaagagaaaaaaataaaacctattatcaaccacacttgggataccattaagggccacctcactttattctgaaatttctacttcagggagattaccaagcttccagagagaagcaaaatgagacccatttaagaacatgtgacctatcgtgacaaacggaagttcttttttttttttaagttttttttttcttttattattatactttaagttttagggtacatgtgcacattgtgcaggttcgttacatatgtatacatgtgccatgctggtgcactgcacccactaacttgtcatctagcattaggtgtatctcccaatgctatccctccccctccccccaccccacaacagtccccagagtgtgatgttccccttcctgtgtccatgtggtctcattgttcaattcccacctatgagtgagaacatgcggtgtttggttttttgttcttgtgatagtttactgagaatgatgatttccaatttcatccatgtcactacaaaggacatgaactcatcgttttttatggctgcatagtattccatggtgtatatgtgccacattttcttaatcaagtctatcattcttggacatttgggttggttccaagtctttgctattgtgaataatgctgcaataaatatatgtgtgcatgtgtctttatagcagcatgatttacagtcatttgggtatatacccagtaatgggatggctgggtcaaatggtatttctagttctagatccctgaggaatcgccacactgacttccacaatggttgaactagtttacagtcccaccaacagtgtaaaagtgttcctatttctccacatcctctccagcacctgttgtttcctgactttttaatgattgccattctaactggtgtgagatgatatctcattgtggttttgatttgcatttctctgatggccagtgatgataagcattttttcatgtgttttttggctgcataaatgtcttcttttgagaagtgtctgttcatgtccttcgcccactttttgatggggttggacaaacggaagttctgaggtgtcctagagttagaagaggtagtttttcataagaaaaaaaaaaaaaaaaaaaaaaaaaaaaagaacgtgtttggtgcctggggagactttggcctcaacaaatatacctgtagcttttctaggtttagctgtagcctaaaatttaaaactaaatatttgaaagttgcatccaatttcctcaaagctgaaagagaaatcagagaccaaactctttttttttttgattgaaaggtgttgctgaggtgaacaaggactattattctaacaacatagagcacgttcttccagatcaccagctgataatgtctgtaaataaggaggggtaatctgaatgtagaatgatggagaagatagaatttgcctttggtatggaaaaaaagatgggaaattatcacttttctactgcaaagcattcatactccatcagttaccattgattaatttatgcatttatttattttccctacaattatgtattgaacttatattagtttctaggcattgaagattcaacagtaaatcagacagacttagatccagtcctcaaagtacttaaaatctatctgtgcctctcaaaattcatatgttgaaatcctaacctgcaaggtgatgatattacgaactggggcctttgagaggtgactagatcatgagggcagagccctcacaaatggaattagtgccattatgtaataggctccagatagatcctcattccttccatcatgtgaggtacagctagaaggcactgtctatgagccagaacacaggccctcaccagactccaagtttaccagcactttaaccttggactttccagcttccagaactaggggaaataaatttttgttgtttataaggtactcagcttatgatattttattatagctgcctgaatggactatgacactgtctaatgaaggacacagacaatgatctaagagtaattatgccatgtaatccatgccaatatgggggaatgccaagtagctctgggagcacttagcaaggccacccagcaatatgtggggatggtggtaggctgtcaggaaatatattccctgaagtggcattttatctgaggcctgaaagtgtgagccaggtaaaggaggattgaaagtaaagagggcaagaaaagagaaaaaaagttctcatagtatgttggagaaactaaaagaagtttgatatgtcttcagtgtaaagtttggaaaagggtagtagaaaacatggctagaggagggagcatgtcttaaagctgtgccaatctgagacctaacttttgaggtctgcatatgcttggactcagatagagctgggtttgattcccagttctcatctttcccagcaacttaggcaagttatgccacttctaagactcattttccttatctatataatggggaatatacctacttcctaggattgcttggaaaattaaatgatggagcatatttgtacctggcagattggaggtattcagtacatgggagctacagctgttgctgttactacagtcaaatagaatggcattccaacaaggaataatgtatcaggaaagtaagctctgctgccatcagtttaggcatcagcagagccacatatgttgacattttggggtagggtaacttcctgatgtgtctcagtatcttatcttttgagagtttagccctatcctttgtttcaagaaagcaaagatttcctgctgtaagcagtggagtcatttgatacaatcattgtgcccatccattattacactttgtcctggtcattcatgctgcctaagaagatgcctaaatgatcatcccactccccctctgagtgggcataagaagtaaatgaaataaattaatgcagtggttgctaatacctatgttaccttctttttgttatcagcattaagactccttgtaagcaggaaaagaaaaaaaaaaaaaaccctagacagttatgaaggatggtttctcaaaaaaaaaaaaaagaaaaaacaagacatgtctattgagatttttacagtcgttttgattgcttttcacatcactaggctcaaacaaacagaacctctctgtacagagagatagtaagaggacatgcacaaagcactaaagctctctctgagccaaaaaaagaagcctgtcatttcatttcgtttagcccctacggctgtgggcttggtttttctatgttaatactctaacacacctgtactgagaatttactccttgccaggtaactggggatcatagaaataaaagacatactctaagccctcccgaggtccttgttctgttgtgggagacaaaccagtgagccagggtttttttttttttttttcttcaatgctgtctaatggacagtccctgtactaaatgcttcatatactttattaaagtcctccaaatcattcttcgaactagacagtataaaattccatttgtggataaaacaattgagatttaaaagtggttactaggctaggtgtggttgctcacgtctgtaatcccagcactttgggaagccaaggcgggcggatgacctgaggtcggcagttcgaaatcagcctggctaacatggtgaaaccccgtctctactaaaaatacaaaattagctgggcgtggtggcgcctgcctgtaatcctaactatttgggaggctgaagcaggagaatcgattgaaccagggaggcagaacttgcagtgagccgagatcataccattgcactccagcctgggtgacagagtgagactccgtctcagaaaaaaaaaaaaaggggggttactagtaacttccccacagatagataggtagtaagtggcagagctgggatggggccagggcagtcttgcttttgcactttatgtcacgctacctccacactcctcacagtctgtcagtgggttactttgatatgtgttattaaggggttacttaaatactaagtactgtggaagaactgtgggtccacagagaggaggggcttttgacagaaggcagagaaagagaaagatggagtcagaacaacttgccaagggaggtggcctctgctctgagatttgaaggctgagcaggggttggccatgtaaaagcgtgaggaaaggagacatcctttgagctagagtgagccgcagttacaccttcacggaggcttagagaacaggatgtcttcaaggagctgcaggtcgctcggtacagctcttggttatctgcaacaatagagggaatgtgtgggacagatgatctgaaatttatgtctgtttggcttctgtatgtacaatgtttttatttatttatattctgccttgttccacaaaggttttgaaagaaaattcattacatggtttttatgcagtgaccttcctaattaagtttttctcagcactgtcatgttcgtctttgtattccctgagccatatgcagagagacttgaacaaaagttgaattgaatttacatactttgagcactctgtaagcagttagcaagggcaactggtcccagaagcttgtgggtggaaaggaaaaattttactgggccaaaacgtaaaattgcttagattgaggtaccgtatttcatggattccaacacactattgattatagggtatgctgttattaaacttgaagtgctatcaaaaaagaaaaaatcctgttcattaaattatagcacaatataaactcactatctattgcaagatgtactctgatttcagatatattaaatgtggaaaaaaatgtgtctttaaagagaaaatgcatggtgatgatattaactcccaccccaaatggtcagaaattctaaaatgtactgattccctggttgacatgagagaaaatgagaagtcttacacatttctggatggcaatttgcccaacaacctaagcccaaaagattctgcaaactctgacctagcaattatatctctaagtctgtgggttcagtttttctatgtaaaaaataattaaagttaaagaaatactaatttaaatttaaaaagttacattgcattttaaaaatcaggtaataaagtatttgttataaaattactcctgtgaaaaaatatatttacatttcatgtttacataggaattaaaatcttgaatgacatatcaaaatgttgacagagattgtctggatgaagcaattttggttgatcatttttatgttctaatttttcaaaaattggaaaactactggttagataatagcctttttttttttttttttttttttttttttggagacagagtctccctctgttgtccaggatggagtgatggagtgcatggagtgcagtggtgtgatctcagctcactgcaacctccacctcccaggttcaagcgattctcctgcctcagcctcctgagtagctgggactacaggcgcatgctgccacacctggctaattttttgtattttagtagagacagggtttcaccatgttgcccaggctggtctcgaactcctaagctcaggcaatcagatatgggcctttaagtagacaatacacatgtgaatattggaaaattaactcccttgtcttagcaactttattttttatgaagtaggctcctgaatctttcctgtctcatcaatgagtctgtccaggctccaggtggttccaactgaggccctggttaaaagggtgtgaagattatttgattcccaattggaaatacagctttatcacctggaattttcccttaaaagttgatacctaaaaggagaaaataaaaataaatacttctacctcagggtaccagagggtctggggaatgagatctttatgatgtaatcttagtctgaggcaaactgtgagaccctgagcacatgcaagtcacgttcaaggtcctgcgagtgggaaagagggtgatgagcagaagtcaagcttaggcttcaacttttgccatcgcttaaatggtaaatcctccatctctaagagtcacactgctacaaattcacaacttttgttttgtaagtcattcataattcttcataaatgttttttctaaaagacaaactttttggtggcctaggctccactttaaggggaaaatgcaacactgactatatctatttatgaggtgaactggacctcctgcttcatagaggaaacatttttgaatggtcaaacatagtattcctgcttgaataggaaaaattgtaacaatgcatttggtatttgtattttatccccaaattagtgagttgcctttttgacatttttttcaaggtagctttatatttatgtatagcttgcttttaaaaaataagctgttcttatacttcccaacattatatacctaactgttccttaatttaaagctcagctcatgtacaagttttattttgcaatcaagttttatttacttgtttatagagtttggcttgtcattgctttttgtcagctctgcaaggtttgagccatttgtaatctttgaatatttacatagtatctatctacctacacctattttttatataatgtatggcagttgtaacctaaaagagtaaaacaaagatttcaagtgccatggaagtctaggtcaagaagagatgagttagcatttggtgaacaaaagtattctagtgggcatctactgtctgtctttcttgcatcattttcttctttctctggatagcagaactccatgttgatctttccactccactttgtcttaatagagctacaagtctcagagccctgccctcctggctgcagattcaggcctggatgattgaagcgccacatctacttggccaggatagttgattcaaatgtgaacatctattccaaatccaacagagaacttctctggaatatttatatatggacacagagaaaggagaatttttctcccttttttgctttcattttggattgtgagccataagaatgccagtcaggagttatacctacttgttctggccagatggaagaagtccagatggaagaacatttgctaggggaaaaaaaaaaaaacataaggctactgcccaaggagaacatatctaaaaagggagcacagtgacacatatttaatgagcccttagagactgaatgccacctctaccctttgatttcccaacaaaatcccttttccttttcttcgtataaacttgatagaattgggtttccgtcatttgaaactgcccaagtgcttgactaatccttggccccttagttatcttccaaatcacactaggtgcatacatatcctccccatgcatccacagttgtctgtgttccactgaattctctatcatatgagcatccaaacaggtatgattttattaaattagtatcagtgtagttactctaaagagaatatgagtgatttcagcctagtatattttccataagccgtagccttctcctggaagtattccttgttgaatagttctttgccctagtgttcagactttagtactggactaggacatttgtccaccgctggtgcatttagagcctcgattttacattgctgaagacctagcacaatcagaaggaatgagtttcctggagacttgtcttctttgttctcaagattaccaaaggccattttagaaagaaaatgattatgaggctacatgaaatgcaataagattttatagcaatcaagcctgactttggaaggcagctggaaaacaggacactcctcctcccaccctttcttctccccaacaaatgccatatgtctgttcacaatgcattctggctaactgctatgtggttgaccttcgatactgaaaaaataccaaaacacttgggacctaattttcctttcagctcattgttatagtcacatttaatatggttgagggaaaacatgaaaattatgacaaaccggcctgaaattctttaaggtagtccatcaataagacagatctctggataattcataatacttgtgatggttcagagaaggaggagtctttggggcccttgaaaaatgatgcttctgttgcttaggggtgtgttcagaaccacatcagcatttatgtcatctgtagaaaaactaaaaaacattaggttggtgcaattacttttgtgcccacctgatagaacctttccacttcctttttctatgagcaattaattcaatttcagattactatattggatgcagaacagttaatagaggagtttgctagtccatgtgtggcatagcagaatgaagagactttttattgcatctgtatagtaaatgaaatttcctccccaaattaaaatagcttttgtgttggtttcttagggctgccataacaaagtcacaaactaggtgtcttaaatgacaggcatttattctttcacagttctggggactagaagtctgaaatcaaggtgttggcaggggcaaccaccctctgaaacctgtagaggagaaccttttattgcttcttccagcttttggtgtttgctgccaatcttggcattctttggcttgtagatgcctcactccggtctccgcctccccagttgcatggccatcttcttcctgagtgtctctcttatgagtacaacagttatattggatcagggcccactctaattcagaatgatctcattttaacttgatttttcagattacatgcgcaaagactcttttcaaataagatgacattctgaggtgctatgagttaggactttaacatattttggagagaacatgatttaacccttaacagctaaattgttgcctgattgtaaaactaatacaattagtgaaaaagagaggtataaagaagaaattaaaaatcatctagattcctcccaccaaaaataaccatgttaacaatttggtggatgtcttttcaaatatttctcaaaacaaatgttcttttcttataccgtcagaaataagtcaagttcaaggacagaagcagttgaagatgtctacagttttgtgcaaattataacaaatgatgctgtgatgtgtctttcttctttcactttttagttgcacttgtgcaattacttctttaggataaatgcttagaaatacaatgtctgtgtagaagaaaaatatgcatttttatacatattatcaagttatacactagaaagaatggagtaactccattcccaccaataatgcatgagaactcctgtttctcccatcttctttgtcctttagattacaagtattagtatgatatatgttaaaaactttaaatttatgaatatttctatgttctcctatgtgaaattctaaatcatggcatttctttattcttaggtaataaatgtgaatccatagtttttttttttttgagatggagtctcactctgtcacccaggctggaatgcagtggcatgatcttggctcactgcaagctccacctcccaggttcacaccattctactgcctcagtctcccgagtagctgggactacaggtgcccgccaccacgcctgactaattttttttgtacttagtagagacagggtttcaccgtgttagccaggatggtctcgatctcctgaactcgtgatccgcccacctgggcctcccaaagtgctgggattacaggcgtgaactactacgcccggcccaaatccataattttaatctagtattttcacactttgataaatttctaattctgacccatccacacatgtttttagtacagggtatggaattgcaatccagagattctgattgaactgagttttatttctttattaagtcactcaaaattacattgtttgggaatgtgaatgggaaatttagtgtgtttcctgtttgcctttccaagagatcagtttcatttaatcaaaggccttgtactaattcacagaaaaatgcatactcaaaaagtaatcagggacataatgttgagccatggtaataagcagtacttttagcttcagtactcatagttaattgaatttatcaacattcttgctgtaactaaacccttttctctcccattcagcccatgaggttgtaagaaagtaaatgacattacagggttaatcttgactccattttaatgtgttttctttaaattgcaatcttggcacatttgggccttttgattatcagtagttgaaattacttgccaaccatctttcaactctttagaatggacttgatgttaagacccctggtttagagaggcactcattttttttttttatagcagaaaggcataagctcagagagaagtattctttccccagagaaaatctgtaaggagttatatgagaggatccaaatccagcttactgaaacaagcactgttttcagataaaatgaagacaatatcccttcgtatctctttccgtgatccttcacatggattcactattgaggaacacttgctcccaaaatacgcccttcttcacactggccttttactgctaactttgtattggattggtgggtgattctgtctattctttcagcctcattgacatgtgttcaaggagaggcagccccaacaccttgtctcaagtggatgacatttcctgtcagtaacttgctatttagctacagagaccagcctcctcatccttatctctttaaaggagtaaatgaatacaaattaaagttttaatctcagactgtaacatcaatagtattttcactacaagtagttccataatggtctcattactgctcctaagtgcaatacgctgagacgtctaaattgccgattgccactacatatattctttgagaaaaggtatccaggtaaccatggcaattgtgtctccaggcaggatgggagtggggtgggaaactatttcattaattgaagggaagagattgaaaagagattttcaagctttagatcagagagagaaagaaagaaaaggtagatcccacaaccttattttgttttcattattagattatgcaacccaaggaaacgccaaacgatttgaaaggttcagagaaatcacaagattaaataacagcagcattcttagcctttccacattattacagtggttgacctgtaccagattttctttggctgggttttatatagtttgattgaaattcaatatatctcctgagaaagcagaattgtgtcccatgatttaaagagaaaaaaaaaggaagaatactcacaggagcgggaagactgtgtaggtggtataagagctctatttatttcaagttgatagcacctgaaaaggctgattttatcagtaaaattcatttgcaaccttgcttccctgcccttcctccacccttggtagtcctcaacctttaaaacaatttattaaaggtaaagaaatactgtgatgaaaaaagggcatctagataatagggaagaagaaaacgaatgtctgatctggtctctcagaggagtctaatagtttgttttcattgaaaaggtatggcaaattagtgattagatcagcttctgttatttaaccaaagatgccctcttgtaacttactgtgttgactctttgacaaatatgttctaacttaagatttgcaaaaccctcatttacacagatagacaaactgacttctagtatacgttagccatagttggggaattatttttcaaattaggccaacatacagcactttaatgacccatgttaaatctctgtaactcctgatgaatacctgctttgtacttcctacacactatactatctagttaattcaggaagaaaaatagaagacattagatgcaactattaccaaacagggtagtgaggacttggatatgttcttcaggttccttcctcaaaatttaagtccacttttcatcaatcactgggagaggcaatgtaggaaaatttatttacagaaatgaggaaagcaacctaaaactgggtggataattattaaccaaatggattttattttaaaacaaacatttcttttctgccaaacagatttttatcttggaaagcaaatacttttccagaattgggccagaaatcatggtctgaattgtaatagttgtttgggcactgtccaagtccgatatattgactaccttgctccccactgcaacccagaggcttttcgtaacaagaagctaaagttgtgctgctatagcagctgctgatgatgttttttaagggctgtgtgcccagggtgcacccactggagaggcaataggaaataaaaatagcaatttgttttcctaaagtttagaggacagtgggggaaagcattttcagccttgtcatcagggataacatagttttatattgtgtgcacataagtctaatttttgaagacagaaaatcattgtgtaaggcaattcgatttgagaaagaatgttactgatggtatgcaagaagaaccattgtttccaagaatgagctgagacacgtgtcagatctttctaatagccaggtgttactatggacccctgcctaatggtcagtgtgtcgtcagctgctggcaactcttaccttataaagacaaatattgggattgtgcagagactgaagtgtgaccagaggctgagtgagatttgttacatttgggctatcgattctaattcacaatttagtttttgagccaagccagccgttagtcatgtggattctataaaatgatttatctaaaatctctttatccctgtgttcccttttaacgctgtagccgcttaagcaacagctttacacaaaaggacatacaattagctagtagcgagtatagcccaactacccctgtgcacacttcagcaatcaacttgaagcagtaccagatgaagagagacaagtctttttttcccatctttcaaaggtggctctgatatctgtcttccccctgtccccccaccactgcttggagtatgataggacaacagcaagagctcacatgccaagtgatgcttgaattcatggtaattgctcctccttccaagttctggggtgtaagttagagtctttcattgcaagtttcattttcaaaaggcagtgcaatcaatagtgttacttttctgagtcccaagtctgttgcttagtctcagcatctctgatgactgtgggtctattagcataagctagaactgtaagtggtgaatatttttattatctaaaattacactagaactgttaggccgaaagattacaatttgtcactgaatgtggatgtatggagaattgtatgtagagtatataaaatcttttctatgtctaatttgcattgcaaattgagaagctaaccagaggtcttgaggaaataacataaataaaacatggcttcactactgtaaatgctcaattcatgccagaggaggccgaagccattacagaaggattgtttccatctaaacaattcccatctcacacacttcccttctaaagtggctgccaataggacgggaattgggtggttggggtaggggtgggggtatccgtttagacagctttaaaaaatactcagcagagaaagcctgagagggtgtttctcaagaaagccaaagtcaaggctcaatcctgcatcttgttttatgttgaacatcctcacaactgaaggaaagacagcaacctgctcttcagtttcagccccaaggaaccagagatctacacaaggtcagtaatcagacaaagctcattactaaacgtttagggaaaaattccataatatgaggcagatgccttggttagtttacagacaacattcaggatctctcaaaatgtgaacttcaacttcagtggatatttgttatatttctgcacagcatttatgctctcttcttgtgacaacagcaccccaattctactttggggtctatctcttcattattctacctgcatgtgctttgcgcctacttcataatttccaaagcctgaatatgtggtttagacatctgtgcagtctgccctctagtgattggatcaggatcaacagggaccagcacgtgactgaaatctggtcaatgaaattcatttcctgttttttctggaactgttggagaagtggactgtctcagtcgctgagcttggtgctttgtgtaatgagatgattgaggcttggagctgcagccagagaacagagccaatgggacagaagccaagttgagaggccagaagaaagacacaaggtgcctaactaaacatatggtttaaagccttatatacctggggccagccctattttgtgactgcttgatgaggcaatacattctcttgttgctcaaatcacttagactttctgtgagagatctaacggccatatgcacctttctcaccactgtcctttcacatctcaccatctaccacttccttctttggagccgctgtaagtgaacttggcttagccatgcaaccctgtgttctcatgagtccatgcttttgcttatgctaccacttcattaggaatgcccttgcgttctcttcttttcctcaaggcgaaatcccactaatcacctttcatgttcaacccaatcaccttctctgtaaagggattcctaatgaagtggtagcataagcaaaggcatgcactcatgagaccacagggttgtgtggctaagccaagttctcttcattcatatttttcccctactcctctcaaggcaaaatttaaaacttgccatgctgtgttcatataatcgtttcccttaccctataaacccttaacactttatgcaaatactttttgagactgtctgtctctcccatgaggctttaagactggggactatgtttattcaacattcagaggcaggaaacattgttacgggcatgagctgtctttggatgcagactgcctgggtttaaacactggctctgctgcttcctaggtgtttggcttaaatatattatctactctgtctgtgccttggtttcctcatttatacaacgagggataatgttaatacctatttgtcttataggttagttgggaggatgaaatgacttaatgcatgtgaagtccttgatactgttcctggaagatggtaaaatttcaataaatattagctattattattatatttctagtttctaatagtgcctgatgtaggtacacaaaaatataaatgtaacaatgaaaagaaggcttaaattctttaagtcttatatattaagtagaaaacaaagggaaaaaaagaaataacttaatctttataattttgttttcttaaattcatgtgttcctatgagaaatcatgaatcattaaaggaaatttggctgatttggggagatttgttcatattcattcatttggtgcaaaaacttctattaagagggcattatgattggacttgagagttaaaattaagataatatccttactttcaagaggctcatggtttagtagatacatttgacaggtaaataagtaactataattgagtgaatgtgcaacaacagaagtatgcacacataccatgagggcatagagtaatgtttcctgaaactgctgtacataagactcatctaaggactttgctaaaaatcacagaatctcagaaagggcacccatggagcttctgaaacactgggtttggggtcatgtatctgtacttgtaacagaacttcatgggtaattcctggcataaaagacaggataataactttttgcctgaataggtcaaggaatgctgcatggtgaaggtgatacatgtgctaggtacttacagatgattaggagtttgctaacatttgacatgagtggtactattaagcttcaagaatagtttttttttacaatcaacaaagtgaagagacaaccaacataatgggagaaaatatttgcaaactatctatccaacatgagattaataaccagaacatataaggagctcaaacaactcaatgggaaaaaaatctaataatttgattttaaaaattgacaagagttctgaatagacatttctccaaagaagacatacaaatgacaaataggcatatataaaagtgctcaatgtcattgatcatctgagaaatgcaaatccaaactacaatgagatatcatctcaccccagttaaaataaaaaccagttataatggtttttatccagacaggcaataacaaatgccactgaggaagtagagaaaaggcaagcctcttatgctgttggtggggatgtaaattagtacaaccactaggtagaacagtatgtagattcctcaaaaaactaaaaatagagctactatataatccagctctacctagcaggtatatccccaaagaaaggaaatcagtacatcaaagagctatctggactcccatgtttatttcagcactattaacagtatcaaagatttggaagcagcctaagtgtccatcaacagatgaataaagaaaacatggtacctatacacaataaaatactattcagccataaaaaagaatgaaattctgtcatttgcaacaacatggatggaactagagtacattatgttaagtaaaataagccaggcacagaaagacaaacaattgaactcatggagacagagagtagaatgatggttaccagaggctgggaagggtagtggggataggagtggggattaatgggtacaaaaatataattagaaaaaataagtaagagccagtatttgatagcacaacagaatgattactgtcaacaataatttattgtactttaaaaaatagctaaaaggatataattggaaggtttgtaacgcaaagaaatgatgaatgcttgaggagatgggcaccccatttatcccgatgtgattattatgcattgtatgcctgtattaaaatatctcatgtacctcataaatatatatacctacattttacctgtaaaaattaaaaataaggcaatcagggaactttgaacatgatagataatttatgttaaagaagtactgttagctttttaaagcaccattaaaaaaatgaatagctttgctgatatcactgccaaagacagagcacagagcctgacagttgttctacttatccaaaattatgtcacattttttaaaaaaaatttaagtttcaagttggcagcacagtgaatcacctggaaagaccttgaaatatggtgacatttggggcccatcccctgaagttcaggttcaactgctctgagacaaggccaaacatcagtacttttccaagtactgacagctctttttaatgcttttaaaaggtagtgaaaataaatatacagccaaagagtcactgtttaggctgtacatagtatccctagaaagactctaagtgctggacctaacatcacaggttgtatgctcccagatgccaagacagaccaagtctcttgcttgaataaatgtcaaaagagggtgactaaagtcatggtataatttccaaggtttacatgaacaaattaatgctgttagcacaaaataggatacaaacaacataggtatgccatttaccaggtaattaacagatatataagaaatatttaattcttagtgccaaaaattttcggcaatatggataaaacactaaagggtgtaaatacagtcatctttaaatcctggtatactatgatggtatacaacctcaggtagagataaggtcaagcatctaaatttgagatttttcatgattgaaagacccaggcaaatggcccttctatctaagacctcacttaccacttggcagttcttcaaattcactcctggagatgaactccagatttaaataaagcattatttctgagaatggtactctggaatctcttttttgtttgtttttttttaatatcagctttattgaggtataatatacaatagaatgtatgcattttaagtgtacagtttgatgggttttgataattattatacccatgtaaccagtaaccaccaacacagttaagatatagaacatttccattccccgtttaaagttcctcatgccttttttttttaaaaattaagttccagtgtatatgtgcaggatgtgcaggtttgttacataggtaaatatgtgccatggtgatttgctgcacctatcaacccaccacctaagtattaagcccggtatgcattagctatttttcctgatgctctcccccatctcccgacaggtccctcccaataggccccagtgtgtttttcttctccctgagttcatgtgttctcattgttcagctctcacttataagtgagaacctgaggtgtttggttttccgttcctgtgttagtttgctgaggataatgagtccaagcttcatccatgtccctgcaaaggacatgatctcattcctttttatggctgcataatattgcatggtatataggtaccacatttttaaaatccggtctaccactgatgggcatttgggttgattccatgtgtttgctattgtgaatagtgtagcaatgaacctatgcatacatgtatctttataatacaatgatttatatacctttgggtatatacccagtaatgggattgctgggtcaaatggtgtttctggttctaaatctttggagaatcgccacagtgtcttccacaatggttgaactaatttacatagaatctttttttttttttttttttaaagctcctcagtgacttaatgtaggtgatccaccctggcattagaggatcatggaaatttataatctttggcacttttgtaatgctaagattctacaaataaaattctacgtatatgagtaaactgaaaatattattatcatgatcttcaatatcttcccatgggagtaaaggaataactctccctttctttcttgccctgttgattttttaaatcctttttttgggatgaccaagtcctttgtaatgatcacttattattacaaaccaagataaacaacaccataaagtacttgtggtgatttttttttctccatccattcactctttttgacagacaacagcatcctgctggggcacctcttttccatcactgtgtgtgatcttagtgaggctgtcaatcaggatgccttgaatgtgatccaagttaaaatgatcacgttgtctctctcaagactttgggtattgagctgagctacacaaggatggggaaaaaaagttggggtcgattaattcctggaatagctttcagatgggacagtcaattggatacatagacaccctagctgcccagttccaaccctttctcagctagattttcaatgtgctgaactacctatgttctgccaacaatgtcctgttttgctagctttagccaggatcagtttccgttgcttgcaactgaagaactctataaggtacaatgttataagaaaggcagtaacaccatctgtatagtctggaaccgcaggatctggtctggtgatagattatagctaaggtcagtggaaagtgtgagcgagtgagattatgtgattaaccttggctgctaggtatgtgagagtcataagctttagcaaatggatgacctggatggttatccacttcagacaaaatgttagcaaatgaatagaaacagcagataataagtgagaggggtaggggactaaaatcatagtaagtttaggcagatagctgcaaagtttcaaaataaaacccatctctgaggttaacagataaaatatgtaaaaatgataaacaatatttagaatccctggcttcacaagccaaaagctaaatggctgatactcagttacatgccctcctgctaatcaaaacagagcactgagttataaactagaaagtgtagtaagaaatgcacatgaatctgcatctgaacaaaactactgattgtgaataaatctgcaacatggcttctgataaagcatttactctcctcatttgctcgacctgtagctgttgcattcaaaatacatacacatatacttacacagacatatttatatttgcaatttataatatgtctgaaatgtaatactccagttcatttgcaaggttgctaccaaggtatacggggtataattttatcatccagggcacaatggatacaccagctccaaacatagaagtcactgagttgccatatattactatagaacaagcattttatttcaaacgatgggaacctcacataagttaggggaggaaaggcaaaaatgaattcagtggtgttaatggagttggtcaaatacttgttatttaagtcacaaaaagatataaagtgatacaaaactgaatttgctaaattatcagaagaaaatgaatcccaccaagtgaagaagttaatatggcaaaatggccaatgtttatggaatacttagcctgtgttaaacattgcactgagcccttcaataaacacaatctccattaattttataacaatcccatgaagtagttattattcctatttaactgttaaaaataggtttcggtgactatcggctactgaggatgtatccaatgccaaactcctatgtaagaatgcatacatctaaacacaaatgtggatattttaataagacattcaaagccagaaaatgggtagagatgcatgaaaagagaattggtagcatcaactagtttggttgttcactaagaaagaactgaagtctccagtatttctaaattgggatatgaatatctaccaattggtatctgtgaggtagacttggggggcaggtgtgcatgcaatttaattttccctataaataccacattatgacagcatttccctgtagaagagaggatcacatagtttggttttaccaagagacttttttttttttttttcagtttggggagccatcagagccagtctctctccctcctccgaacctcactcctggaaggtgttttcttggtattagttctccaggacctcaaaatatatgaggatactttaatacaactactgctctgctaaaatggaatgactaacattgaaatgattcccatgtcagtttttaagcagatcagttggacctccagaaaatgtatgaattgaaaagacatgcttcacttagaataatagtctccaatctcatccaggtcaggaatggaaaaccaaacattgaatgttctcactcataagtgggagctaagctatgaggatgcaaaggcataagaatgacagtggactttgggaactcagtgggaaagggtgggaagggggtgagggtaaaagactacaaactgggtgcagtattcactgcttgggtgatgggtgcaccaaaatctcacaaatctccaccaaaacacttactcaggtaaccaaacaccaccattccccaataacctatgaaaataaaaaattaaaagaaatgaaaagagagccgagatctttagagaaacacacgcaccagtacatatgtgtatgtatacatatatgaatatgtgtatatatgtgtgtgtgtgtgtgtgtgtgtgtgtgtgtgttgagttgagggtatagtggcaatgatactactgagtgtttcctttacttagctcttaccccaaaagacatattttctaatcagtaaaataaaccaggtacaatcccatagtgtaggtatttccaaacttcactgaccatcagaataaaaatagccagagtttctctgaatgcttactgtataggaagaaccatgatgaataacttatctgctcgatggtcctcccaagtaggtataatttccctctttcatagatgagataatagactcagtcaggttgaattatttggccattaactcatctagtgagagtgaaaaccataatttaaacataagcagtctttaccaagagctcatactctaccaattgtgctaaaatataatacattattgttggagcctaggaatcagaataattaaaagcccccagatgattcttatgcatccagctcaatactggtccaagaatccactggtaagtctttgatgtgcatatcaatcacctacagattttgttaaattataaatattgattcattaggtctgggtgtgggcctgagaatctggatttctaacaagttccaggtaatgccaatgcctagactacattttgagtagcaagtaaatagggcacagcattcagttatacaatgttttaaattgttctgtaatgaaaactataaattacgtccccagataaattggaagcacctgaagtatcaattttacagtatctccatatgctagtagtactagacccataaaaaaattaagccattcaaataatgcttggtaagtaattcccaagagaagtgctcttctgactctttttaacacccagcacaagaagaactggaacaaaggggcttgcttactctcagagtgcaggtgtcctgatttacttctgcatggaagaggttacagattctgtccctctgtctggtcacttgataggttgtcattaacaatagtcttctttctattacttttttttttttttttttttttgagacagagtcttgctctgtcacccaggcaggagtgcagtggcatgatctcgtctcactgcagtctctacctcctgggttcaagcaattctcctgcctcagcctcctgagtagctgggattacagatgcccaccactgtgcccggctaatttttgtaattttaatagagatggggtttcaccacgttggtcaggctggtctcgaactcctgaactcatgatccacctacctcggcttcccaaagtgctgggattacaggtgtgagccactgagcctggcccaatagtcttctttctaaggagtctaagaaaatagttatgaagggatatcaacaaagtcattagaaagcagaacaaaggtaaaatacacatgttctttgggattaaagaaattaagtgcaaaaaaccccacaattttctcccatcaaatttccattcaatttttttcatattaattattacaaggtttttgcacaatttattctcctatacactttaatctcatgaatggaaaaaactttgcctgaattcttgactcccatgctctttgttctcctatctgatccccaactatgtggaactgtcatcacagaaaaataattgccctggtcactccccagaaagcttgctcaagattttatccacttttgtttcaccaaagatttgatcttggggaaaaatatatccaactcagccagcttttgaaataacccaggatattgtcatcatgcatattttagaaacacttcaaacttaagagtacgctccatctctttccataagtctccccatgccaaacacacagaccagtccatagacttgagattatagctctttccagaagacaatatgcatatgtatgtatatatctgtcttagcccatctggtctactataacaaagtaccatagactgagtgccttaaacaacaaacatttacttctcacagttctggaggctggaagtccaagatcaaggggccagcagatttggtgtctgatgaggactctcttcctggtttgcagatggccatctttcacgtgtccttacatctttacatggtggaaagagcaagggaactctctggagtctctcttttgagggcattaatcccatttattaggattctatcttcatggcctcatcacctcccaaaggtccatctcttaataccatcgcttgggggttaagatttcagcatatgaattttggaatacataaacattcagtctatagccatatcctagagtttctaatacattttggaactcaaatatttcattattgggaagacatgaatcaccaagtctttctccaagtaaaacatattgtccaatattttaccacttgcagtaaatatgtgtgttgccatctggagctgtgagcttcaaaatggaggggacatacactacccaggtgagtcttatttaaaaatgcagatttctagattctatgcccagcaattctgatttagatcaacagtcagacttagaaatctacatttgcataagcatcccatgtagtcttgcttcagaagctcatagttcagaatgagggacagccatgtaaacaaatgactgccatccgatatgataaattgaatgacagaagtgtgtaccatgcatagtgctagctgcaagaggtgggggcacagtaggaattttacttagtctagagaaggatgttagaggcttcttcaaatagtgtatttaagttgagccttgagagagaagagaaaattcagtaggcaccagttgatgggatataaacaaataaatacatctttatttgcatgattgttggagataaagttagagggcagtgggagcaggtagaggcacctgacacaaatagttatgtaggttgtactctacccagctttagggcaccaatctcaccatagtcatcatagttttgtacatttgttgcaataacgttctgacctatggtaacactatatcttgaataaatggtctcagtttctaagttgtgcaaagaccagtgggccagtgctaggtctagaggagaggaagtgggaagactatatccctttttcacagttttcagtctcacgtatatcacttcacaaggaacacagggaatcctggaggaagaaaatactataattacagcctatggtgttggctgcatgtcaaaaagatgtacctgctcaaaatataaagtgaacctaggactgacagaaaagggtcgaataatgagggaagtaggaaaatctgagttggaggaggatcatcaaacatctatttttttttttctccaaatgttgctgccaagacattaatcaaacaacccatatccagtgttcctcagatacagcaacgagcagacattaatcgcagatctcccgaaggccccaccctttcagattccaggcaccatctatgaagagaagtaccttttattttcccttgaggatgctcagctgccactgtctctagcccttatctgggtccttggagccctttactctattgaattgtcttgattttcacaccaaagccttcaatcccagagagatctttccattccatttttgaaggaaatatcactagtagatctgcctccatgagcactttctgggtatggcatatttaccttctaaggaaagatgaggaatccataaaattagtgttagtcatcttacctctgtaacctcttattactttattaccgtcactaccaaaaataatatttattcatcactcttcatgtgctaatgaattttactaactctgtattgtcacgattttcatttcatcctcacaaaatttccataatgtagccattattaaacctcatttagagagaacatcaagattcagagaggttatgtaacttatcctgaattacgtagttaataaatactagagccaggatataaactcaagattgtccaacttgaaaggccatagtataaatcagtatatgatactgcctctgccctctttccttcagatcatgagctatatcattactatcttccgagtgcctttgtgtgaacttagctctttgtatgtattaaccaatttaaacctcacaacaaacttatgcaataggttctattatttccatttcagagatgagaaaactatggcacagagaaattaaattacatgcccaagatcatccatttagtaagtagttggaggtgggattcaaacaattcaaaaaagctgttgagatcttgtttatttcacatttggttcttacatagtagccttaatctaaccaaagccaatatttttaaggtgttttaataaatatctaggaaaatatactgacatccagatttacaatttagttcagagggagagtatagtagaaacctggaaattctaagtctaaagtctttgccttcaaatatgatagtccttggaaactaaatagaattttatagtaaataatcaaaacctgcctacctaacatgccttctagcattaatgttttcattcaattgtttaatgaccgatgtgtgtttactgagtgcctgaagcttcagggactggggactctaaggggattgagacataatccctgccttcagaaagcttacagtctggtagagactcagaaggaaacagtgattgtagtataggtatcaagtgctatgattaattgggagctccatgaagacagagtctctgccttactctgctttatctccacccagtacctcacctattgcctggcagagtgagaatacaaatatttatatatgcatgcatgaataaatgcatgcactgtggtggtgctggggaactgcaggcagggttggggggcaggagctaagtcagctgggaatgagacagagaggacaatggaaaggtttctgggtccttgaagaggtgcttgaactgtgctgaaactgaagaagttagcatcagtaagccaggcaagggaagaggaggatgggagaaacagacaaatagacaagagcactgtaagtgagttgttatgctgatgatgggtctgtgcaaggctttccaggtttggctgggggaacatacagaaaggagaaccagctgacatactaaggaagaacaagggagactagaagcagagtagggagacgacaatgacagagctcaagaggtcagcaggagacagatcatatttcccaagctaagcattttgaacctgactctgaaagccatggaggagccattgataggttttaagcacggaaatgtcatgatcacttttagttgattgcaaaattgtaaacccttctttcctaaccctctgtagggatggctgtgttagataatactacattgtttcaggacttaatgagtagaggtcatctacctccagctgtgttctagacctacctgactataattctccctcctaggttcttactcagattcccttggctctattgagagtatccaggatagtccctagtccttttttctgctacaaaaggcatttcatcactcagatactatctggttacatgtgtaaagaaaagacatacacatgcttttttttgacggagtctcactctgtcacccaggctggagtgcagtggcacaatctcggctcactgcaacctccacctcccggattcaagcgattctcccacctcagcctcctgagtagctggggttacaggcgcaggccaccacgcccggctaatttttgtatttttagtagagagcgggtttcaccatgttggtcaggctggtctcaaactcctgaactcgtgatccacccgcctcagcctcccaaagtgcaagatcttttaaataaaagtcgctcagagtttgagcaggacagaagacagaagcacagtaattagaatggaaaaccattagacctgcatgaaaatggaccaagcaatgtagtcaaaaacctaaccaaattagattctgagctctggttaatgtgtctttcaggcaggggatcagccgtagatcctagatgacagatttttacatatttgaggaaaagtagtaacttttaaaatcaaataaaaagacaggcatgatttcttgcatgctgaaactgcaagccctttttcgttgtggaaggtacacctcacagctcctccctgatgctttaatttatatgatttataaaaccaatgtatgcctattgtaaaattccaggaatagagaaaaaataattttaagtaaaaattattcttcatcccaccggagtcaaccaggcttaacatttttgtacaactcttgccccagcttttatcctcttatgaaaacaatattattgttattaccattgttgtttaaagaaatattaccttagttgtataatttgcttttttccagttatactgtaaatatgtatttgcattatcatttttaaagcacacagagtattccattatgcagttgtaccataattgtatcagtatcatcttcataaacacttaaattgtcccgataacagcaacaaaaacgcttaggaagggggaaggctatgatgaacaccaatgtaggtaaatcttatgtttctatgactatttacttagaataaaattcaagaagttgaatagctgagccagtggcatgcatgtttaatgcctgggctacatgctgatgaattgtctagaaagattgtattcatgtactatttcaccaaaaaagtgtctattttgctctatctgtaacaactttaaatattatttttgattctaacttttgcctacctgataggtaaaaattagcaccacattgttattttaatattttgttcctttaattactaggaagcttgaacacctttccatataactatcaggtgtgtattctttttcataaattgtactttcttgtccttcctcatatttgtttggtgatgccttttatatgttaagagtattaacccattgaaaacccatttttatagcctgaaatttggttcagtcatctacagagagcattcagcccaaaatctgcccaacatcagtactggatatttaaacttaagcaatccatagtcaggaagacactggtcccccatggaggagattttttttcaaaggaatggatcataaagcaaaagggattttctatggtgtccctattagtcaaataaagtggtctgactcactttagctttggcaattcctggtcattgcttgtgtgtgtccctagagaacagaatgaattaaggagtcaccatctaaggtgttttcaacagaaaacactttggcaaaagcttatttagctagtctgggattaattttcttaaccagttagaacttcaaaaagaagggaatgagttaataaactcttcgcaacatccctgcccccatactcccatctagtatggtcttctgagtctgcacatggctggggctcttctttccacacgtgtactctgagccctagaaacacttaggctgtgaagcacaatacacttgtttttttctttgggtcagttcaaattgatcatgccaactcttcccattccctcctctttgcttccaatgtttcctttctcttttgtttttcagaagaaggtagaagaatttggtagacagagagagagagagaaagagaatgtgtgtgcattaaaaccagacaaggaagcggctgggtgtggtggctcatgcctgtaatcctagcactttgggagaccaaggcgggtggatcacgaggtcaggagttcgagactagcctgaccaacatggtgaaaccccgtctctactaaaaatacaaaaagtagctgggcgtggtggcacacacctgtaatcctagctactcaggaggatgaggcaggagaatagcttgaacccaggaggcagaggttgcagtgagccaagatcacgccattgcactccagactgggcaaaaataaaaataataaaaaaaaaacaaccttaaagcaaaaagtccttggagccaataccaattgatgacccaatcagagataccatttcagaattacaagtataaccttatttgattctcatcaccctcaagttcgctgcggaacttgccaaaggcccaaagctagatagtggcagagctgggactctaactcaggtctcaatgacttcaaactcatttttatgagattatgtgtctcataagtcaccatgcctgctacctcttgttttacaggtgaatgaacaaaggcccagtggactgagcaactggctaaggcactcagactttcttagtggagctgaatagagaacacaggcccctttactgtgctgactcatctttgagatgatgatgcaattcaacaagaaaagattcaatgtgtacaaattggattggggcaattattcaagaacaaattgtataaagtgagctacacctcaagctctttgctttgcttcccatttaggggcatttcctatgagtccttatacaactctctgtggtggttataacctggtatcaaatcaaatcaaaatcagaatcagtgcagacaatcattgcatgagatttgctgtcttcatggaggttttgtgtagtgaaacattgggctgacatcgcctagggaatttcatgtgaaaattcctcccaaacatttttattctcagagttcctcttcttagcaccaccacggagtagggatctggagggtgaagtgaggttttttctctctttccccttctcctgtcttgctctctgcctcaccactcactggctcctacctgaacttccaggttagtcctccactcacacttggaatttcttatccttttgccctgcagaacacttaattgaacatattgtgttagttgagcatttctttggggtcccaagtttttccccaaggggtttatcagcaattattctgaacatatacggcaccttcaatttcctgtcttcattttttttcccatagataatgttattatcccaatttttactaatgttattatccccattttaagaagtctgaaggtcaattagagtaacttgccaaaagtcacactgctaacaccttgcacagcctaaattcaaatccatattggtctgacttctaaaattctggctttgtttaatgacattaactccctaactcattgtattaaactcttactatctgtgctaatttctcaaatattgtataaaaggagttgtcctctaaaaagaacaattgtaacagcttgacctttcaggtctcattcagaaggttcttacaaagacagctctctattatgaataatttacccttctcaaggctgaatttcctctgatgatacttgaccttctccaggcatgtaggccatccaaatgtagcccttaagtcagctggacactggggttcaaagatagttttgccttgtccattgctcagtgaagccattcctaagtatgctccccaaaacatttatcctattatcctcttaaacatgagattccacggctaaatacgtcagaaaactgagaaaacaaaaattaagttggtgtttcccagttgcattccattaaacactgttgtgtgagctgttcatagatctgacagtcaaagaaaaaaatgaaaaaacagtttgaggttaaacaattttggcaaaatataaatactctaattcccttttgggagatttatgataaacattagcatattaacgcttctggcatgtcctgctaaatagtttgacttggtgcttcgcagattttttaaccttaggatattttttttatcttgcaggaccagcccgcaacagcccactctagaaaagcttctggtttaagttctcagctcctgtatttatttttatttttatttttatttttatacggagtcttgctctgtcacccagactggagtgcagtggcatgatcttggctcactgcaagctttgcctcccaggttcatgccattttcctgcctcagcttcccgagtagctgggactacaggctcccgccaccacgccaggctaagtttttgtatttttagtagagacagggtttcaccgtgttagccaggatggtctcgatttcctgacctcgtgatccacctgcctccgcctcccaaagtgctgggattacaggtgtgagccaccgcacctgaccggcatctcctatatttttaagggagttgacaaagggtcctcttttgggaatctgggcctggtcctgccatctattatttgggtgactgtgaacaagtcactcctctctggggctcagttttcccatctgtaaaatgaagataatataccatttgtctctaactttccttccaattctagcataccatcacctaaacatatggaattgatggggctacacaccagaacatcatgacaaactgtgtgtttatattttcttaatctcatcctcttaattgaggcccagagaggaataacttactcacagtcactcagttagtttgatggcagaatcaggcttagattcccaaaagaaaatcatccaccaactcccttcaaaatatataagatgaaaatttaagccatatgtttgtttcctccagaaataaaataataatatttttcaagctatagaattcttatacatacacataatttgtccctatctgccagtacatcatagaaggtattccccagaatcacactatcatttacttgttcagaacgttgaggttttctctgattagccagttttcaggataatgggaaagtgcagagagtggttcaggtgaactgcagtgggacctcaggcaagcaactttccctctctgtgacttgtttttttaatccgtgaaaaagaaaataatgacagtgtgccctccattcctctaagataccttgtcagaactgtcagtcatagtcagaaaactctgctgctatatgcctgccctgtcctgaggtatcagcagaagtgtcgctggccccgcttgctttgcgtcagcttccaggtgagtgctgcataaatcctccatttggtagtatgaatgctagtattataagtacaaatataatgccctaatatcagagataatttactttgcactaatgcacttatcttgataataattcttcttaaaatccatagcaggaaagcatgatggttaatagctaggctctgacatccgataccaggtttgaacccagcactgttacttaccagctgtgcatccaggcaaagtgttactcgctgatcctcagatccttcatctataaagtgggaatcgtacgactcactgcaaagctggtacagcaatgcaatgcaataatgtttgtaaagctctttgtacattccccaggcatacaatatgtggtcggttatggcaattaaaaacattatctatttcagacataaaatgcaaggagattgagaagaaaattgtcaccataccaaagccaggaattggaatcctgtacacccattagaaaggaaaaccgtagttggtgttcttagctaatggtcctttggctgcctgcgatattagtgttggccagaggctcgttaatgttgtcattgtttattattgaacactgccacctagtggatgaattggtcacatgcaggtaaggaaatcacggaggttatgtcaggtcacctggtcacacatggaagaggctgttgtgtccatcttgtccacactgatttcagcttgttgacttgcagccatgcccagggagatactggggtgttcctgcttatgtagactcccctctatcttcgcgcagttgtcaaactgacacaaagacctgagaactgtattcttacactgcggctatgtgagcagagccaaagatcggcctcctctgacatgacctaaggcccctccctcaacactctaatccatcataccattttattttatgcaaaagcatatcgttgtctgaaaacattactttctttctgtttcccatccccttctcttgcccctaactagaacggaaggcagccaagtgtggggccatgtgagccttattcctttacgtatccctcgtacctaacactgggcctggcacagcgtaggagcacaaaaatatgtgtagcctatagcataaaaaatcaatgacaatgccaataatcactgctgttattgtttatggttcctactttttgccgggcacagagctaaggtctgtacatagatcacctcatttaatctctataatcagcctgcttagtgggggtaatgtcaccacccacataggatcagtaatttctagggcttagaattgatctttcaatttcaacaagcatggttcccctttgctcagtattataatgccataccttatttaatcctctcttttgaaatccttcttatagtttcacctattttacagatttgaaagctgagtctcatagaagtgaagcaatttgctgaaagtcactcagttcaggtttaaaacccaggtcttgtctaattccaaaggccctgctgttttcactgcaacatactgccctctattagatacatggataaaaaagggctttcttaattcggtcctggaaacccaggcctgagttttggttaagcctttgtaagaagcctttctcccaagctaaatctcatattggtttttcttgtagccaggtctttattggtttctagatgtctcctccacgttcacttcaaagacaaaaattagctacaatttattgaagattttattatgtgccaggcagggttcaaatgatctcatttaatccttataacagccctgtaaaataggttccattgatattattcctattttataaatgaggacactgagggacagagaagttaagtaatttccccatggttacctggattctaaaccagagcgctggtttgaacctaggcaggcagtttccttccaggatacactcctaagcaccagtggccatcctaggggactatatccaggacatttcctttgctgacatcaggtaagggaaggccctcagaaaacctcaggggcagccccactcagtaaagcacttcccagaatgtttaagctcagaaactgtgctgaagtcagaatacatagagatgccaggcatcctgcagctagccctcctccctcccggtttgcagtcccagcctacggttactcttcaattagtttccatctgtggcagcagcaattccctaggggtacatgggccaaaaagagagaccgactcagccaagaaccagaaatatcctcactgcagcaaacaagctagtgatggaaaagaggaaaattttcccttcaaggtctggacatttctcaaagacagcccactcagcttatataagccgcatgcaccactaaaggaacacaaccaaggccccatgaatctagaacaatcttgccaattacgtgttaattgaaagttatgtagaggccatccacatgcccttggggaaacttgacactgtacttattgaattgtctgttctggatcactgacctgggcaaaggggctcaggcaacactcaaaggacagtggcaaagtcattccacattccatgggtatcagttcagagtttccacccttttttgaacctttcctccaaataaataggcagtgatggtgtttagggacattctgggcttccttgtattcattagttcatgttttcatatatttatgtacttgtaaattgacaaatcttgtcttgaatatacatttgctaagtatcacctctgtttcaggttaatgccaggtgctgggaacatcaaagtgggttagatacagtggggtgctggtaagtgatggccaactggcttgctatgtgtcgggctaacatgaatgctggttgcattttcctttacattaatgaataagacaagattgaaactacgaagatctatgtcagtgtcgtctgttaatgacctgagctacttctttgctgaattgaagtgtcaataatagaagagttctttaattttttgtgttgttcacagatactatgacacgctttaaagtttaatctgcattattgacatttctccatcagtttcttgagtctagacaattaactaacaataaatcaagccttggtttatagcatttgccaatcttcatgtgcaaataagaccatcgtggccaatttcaagctaccaatattttgccactaagcatggagttgaggagagacgtacaacatgaatgtatatcatctcaaaagtatagattatagtacaatctagtaattaggaagaaatgagtcttaagcttttattattttcattttgaatatacaatatttacttatataatttgatattttataatggctatgcttaacaaccagttcaaaacaattcaggacgtttaacaagtggcgccagccagcgggtatttgtcaactccagcctaccactggttagacataggctcctacttgaagaagttcacagttgagttggggaaaagctctcatagtatgaactgctttgtaagaagtaagatcaagatgccatcggagcatttggaaggcagatccagtcaagagttgggcttggggaaagctttctgagacaaaaatatctaatctgagacctgaaggaaaatagatattaactatatgaagggtggaaagtgggttccagatggaggaaggccctgtgcaaaggactggagtgaaaccagatcacagaaacttttggaaatacacagtatttcattatggctggaataaagtgctgaaggtaaggtggtcacatcagataaaattggggggaggagagtacaaagccaggacatataaaccatatcaaaaatagtttgtcttaaagatggtgagtacttactgacagtttatataagtgagggcaccctgattggatttcttatcagatcattccgcctgtggtataggaaagagagaggctagacaaggctatacccaggatgccacagccatccaggagcgagatgcaggttgcctgcctggtggcagtggccacagggatggcaaagaacagaagaatcaagagtcatttaggaggttgtgcctgctggacaaagtgattgattatttgtgtgttttttggggtggaaggagtgctgagggaaacaaagtcaagaatgatactcagatttctgacaaaagcaaccaagtaaatgaatggaagtggagatggtggtaggggaacaggtaattaacctgaaggatgatgagttctcttttagatggattacatttatcgcagtgaatgtccaagtggagatatccacgaagcagttgaatttatgtctgaagctcagggcacatatctgggctggaaaatgaatttcggagttttgaatacatagatgctaaccaaagccacgtgtatggatgtaatcatccaggatgcatcagaatcactaaagtttctgggccatttactccaccagcaccatccaccctctttacatcctcccactgttttactcattactgacaccctataatgtaggtatacttattattcccattttgcagatgaggaaactgaggcatagagagaacaactatttcctcaaggctgcacagtaagtggcagtgcccagatttgaaaccagtgagtctggcaccagaacctacaccctgaactataatgttggtctgcttctgtgtcaaaatacagactaagaagggaagaccagccgggtgcggtggttcatgcctgtaatcccagcattttgggaggccgaggcgggcggatcatttgaggtcaagagttcgagaatagccaggtcaccatggcaaaaccccatctctactaaaaaaaattagccatgcgtggtggcgggcttctgtaatcccagctacttgggagactgaggcatgggaattgcttaaacctgggaggctggaggttaacagttagccaagatcatgtcactgcactccagtctaggggacagaggagactcagtctcaaaaaacaaaaaaaagaagaagaagaagggaagaccagaaggttagacccctcagaaatgaatatttaagtcacaggaagaggaatttacaaaggagatggtaaagggaggtgtggtggtgaggaacttgcggctcataagaaggtcaccttcttaaaaactccctcaccacaaattaggtaattgaggagttgccccgtaaaacttacagtcacaatgaatttactaacattcttttctaatcataaaagcaatgttttttttttcctgtaggaaaattagaaaatacagagaagaaaataaaaatcacagtattcagctatctagaaataattgtggtaactatttgttgtatatcccttcagacttttgatctatgcatagaaaaacagagatcccttcgaaacatttttcaaagtctattttaaaattatattttgttgtttccaaagctgcacattttaaaatcaggatttatcttataatcagtggtattccacaggttaatgataactttttgctcctagttgtacaaagaatgctgcatcttttcattgatagcatcatagatttggtgaaatgtggtaggacatatgttcatatctttaaaaattgaaaatgtgctaaaaggtacacagagaaagatctctttccctctcggcatattccagtgtttctccctggagacagatgatattttccagctacttgtctacccttccagatgcattttaatgcacacacaagaaaatataacatgtgtccccttctctttaaatacatggtaacgtactatccactctagggcatcttggcctttttaaaaacttacgctctatgttgggagtcttttttccaattgcaaattttaccttgaaagaatgcgccacaattcattaagtccctagtgatgtgcaaagttatttccaatctttttctatgagaaataatgctatgatgaataatcttgtatattttgcacatacagcagtatacctattaaatttcttgaaatgtaactgctgagtcaagtgataattcagttgttattttgaagatattgccaaattgatcttcttaaaagttccaatttatacttcttccaaaaatgtatgaaatactgttttcctacagcatttccaacatattaggttatcaaactttttatgtttgtggtacctataggtaaaaattacatctttaacatactttttttattttggaataattctagattttatagaaaagttgcaaagatagtatggaaaatccctgtatattccttactcagtttcccctcttggcaacatctcatatctccatggtacactcatcaaaactaagcaactaacattaatatattactattacctaaacttcaaattttatttggattttaacagtttttctactaatattcctggatcccatctaggaggcaatattgcattttagtcatcttgtctccttagtctcacctggtttctgacagtctctccgtcttcctttgctcttcatgaccttaagagttttgagaagtcctggtcagtggtttgtagaatgtctctcaatttgggtttgtcaaatatgtgtcttatgattagaatggggttagtttttggaaggaacacttcacaggtaaagttccctcctcatgtcatatcagatggtaggtgttatcaacatgacttatcactggtgatgttcaccttgtggatttaaggtagtgtttgccagatgtgttcatggtaaagttactctttttccctttgccacacacttatctctggatatgaatcactaagtcaagcccaaactcaagagggagatgttggctgggcacggtggctcatgcctgtaatctcagcactttgggaggctgaggcgggtggatcacctgaggtcaggagttcgagaccagcctgaccaacatgctgaaaccccgtctctactaaaaatacaaaaattagctgggcatggtggtgggtgcctgtaatcccagctactcaagaggctgaggcaggagaatcacttgaacacgggaggcagaggtcgaagtcagctgagatcatgccattgtactccagcctaggcaagagagtaagactccatctcaaaaaaacaaaaacaaaaacaaaatagggaaatcttagtgtaattataattagcatttatcttataggtaaggatatcttttcataagcttaaggaccatctatattttctgaactgttgacatttttctgttgaacttctaatcaatcttatttttgtcagttgttatgagaaataagccttttctctgtaatgcaaattaaaaactttcacccagcttaccatttcttattttttctgttgtgtttttgccatatagattttaaaaattttatgtaataaaatgtattagtttctcttatgagttatggtttatttatcacacttagagatatattacctatttcttgatgatctttaaaaatgttctgtggtatcctttttctgaggttatgttatgtctttgatctacctggagtttatttaggtataaaaatgagtaggatttgattctttttctttttcttgtggttacttggttgtcccagtagcaatttatggcctattttccattattttatcgatgtgcaatagataattttgccggaaaaatgtgtaggggcttcagccctggacaatttaaattcccatgttctttccatagagacagataaagcaaaacaacataaactctcatattttacattattgttcatatagattgacctcaatatctccaagcacaattttcattttgagccactgttggcacattgggctaccctttctttaaccttacttcagcagcagccgaagggcagcgtggccccaggtcatagctaagtggcagataagggtgcagatccttgagtcacactgggttagtggcattactttaaatctacagttagagctacaaaattggggttatgagaagaattccatggcttgtaattcctcacgtataactcaacccaaatttggagagaaattgccacttgattatatgagaggagatagtatttgaggctaggattctttaaggtggtacatgggcacattgacaacagaggtaagtggtataacctacttatatttttaaaacatctttgacaaggttctgtgtcaaaactcaatgagaaacacaagtttccatgttcttggagaggacagttctgtcagggtcagtcactgcattagcgaaggaaacaatgcatatagataataggcactcatctgagaagacaatatttgcaaagcctatagggtaagggatccttgttccccagagttccatcctaggcccatccttctttaaaatctgcagaaataatctggaggcagatgaacaaaatgataattttaaggttttccgtgttattgatttgttttttctagagagtaaagaactaagtagattaagttagaaaagagtaaactcttgtagatctatttggaatccgggcaagaaagtatcatttgagtttaaaggtaaataacagcaataatgcatattttaaaagaacaaaaaagtcaaaatagaaaataaaggactctgttctacagtaggtttagttcacactactactaatgaactaatagtactttctgtgtgctttatactgttctaagtcctttaacatacattaatttatatagcctttaaaaccagccatgaggcagggttcattattcctcccatttcacacattagaaaatggaggtccaaggagtatgagtaaccagttgaaggtcacataggcagtaagtggcagaggtgggtttggatagggcagtcccgtgctggggttggtggcctgaatcactgggcttgctgcctccctaggagggctctgtacaactcaggcaactgtcacattgatctatttcttcactggaagagctgagggtaagtcacattcatctttgtgttttcaagtttagcataatcctaggcacaaactatatgcttaataaattaataaattttgaccacttaaagtataatttaaaaaaatgtgtatggtgaaataaaaggaattttttttttttttttgagatggagtctggctgtgtcacccaggctggagtgcagtgtagcaatctcagctcactgcaagctccgcctacgggttcacgccattctcctgcctcaacttcctgagtagctgggactacaggtgccccccaccacacctggctaatttttttgtgtttttaatagacacggggtttcaccatgttagccaggatggtcttgatctcccgacctcgtgatccgcccacctctgcctcccaaagtgctgggactacaggcgtgaaccaccgtgccccgcctattttttaaatttcataagtttaaaaacttttgcaattgtgatacaacacatagaatgtaccatttaaatacaaagttcagtagtgttacataaactcacattattgttcaaccaatctccaggactttctcctcttgcaaactgaaactctatactcactaaacaactctccattgcaccgacccccagcccctggtgagcactactctagctttatttctaagagtgtgactactctttatacctcatataagtaaaatcatatagcatttttctttttgtcattggtttattttgctttgcatattttcaagatccatccatgttatagcatgagtaagaatttccttctttcttaagaataagtaatattccactgtgtgtatattccacattttgtttatctattcatcagtcagtggacatttgtgttgctttcaacttttggctattttgagtaatgctgctgtaaacatgggtatgcaaatatgtctttgagatcttgcttttaattttttttggctatatatctgaagtggaatggctggatcatatggtaactcaatttttaatattttgagaaactgtcatgctgttttccatagtggtttcaccactacagtgcagaagagttccaattttcccacatacttaccaacaatgattttcttatatttaaatgacagccatcctaatgggtgtgaggtaatactgtgattttgatttgcatctccctgatcattagtgatgttgaacctcttttcctatgcttgttgactatttgtatattttatttggcaaaatatctattcaggtcctttgttcatttttttaattggttttttgttgttcagttgtaggagttctttacatattctgcatattgatcccttatcagatatataatttgcaaatattttctcccattctataggttacattttcactgtattgtgtcctgtgatgcatggaagtttttaattttgaagtcatccaatttgtctacttttatttttgtttcctgtgcctggtatcatatccaagaaatcattgccaaattcaatgtcataaagcttctctcctaagcttttacctaaaagtttcattttttaaaaaatttattattattattattattattattattattattattattatttctgagacacagtcgtgctctgtctcccaggctacagtgaagtggtgcaatctcggctcactgcaacttctgcttcccgggttcaagctattctcctgcgtcagcctcccgggtagctgggactacaggcatgcaccactacgcccaactaatttttgtatttttagtagagatgggttttgccatgttggccaggctggtctcgaactcctggcctcaagtgatccactcacctcggcctcccaaagtgctgggattgcaggcagaagccaccatgcccggccaacagttttatagttttatgttttccatttaggtctttgattcattctgagttaatttttgtatatggtacaaaggtaagggggcaacttgtaattttttccccagctgattagccaattggcacaacacaatttactgaaaaagaaggtttctttctatcaatttgtaacattattttgttcatatatcaaattctaatgtatatgtatatatttctagatgttctattctattccattgagctatttgtctattctgttgccagtaccatatggatttatttaatgtaggctaattttatattctgagtaagcaggcaaatgccccctcactattattcttatttaaaattttcttggtgacttttgcatattcattcttcctgaaaattttactatgaatttttagactactcctcagccaccccatcaacaccttcctacccatcactcccataaaactaacaagcatagagattaaaagaacaggattgacgttttatagtatttggatatttctctctatatatgtttctcctgtagtatagcccatttcatataataacaacttcatctttctctttgctacaggccaacaaatcccaaacaaaacaaaaaaacaaatctggagtcatccttgagtgccttcattctttcatacccgatgtctaacacatcagaaaattttattagattcgtccttaaaaatggtcatcatttttcaccccccgacaaggtccaagctcccattatattatccttggattattgtaatagcctttactttaataacctctttttcttttttagaattgcgatcttgttctgtcaccccaagctggaatgcagtggggcaagcatagttcactgcagtcttgaactcctgggcttaaacaatcctcctacctcagtctcctgtgtaacagtctcttttaatattattattattattattatactttaagttccgggatacatgtgcagaacatgaaggtttattacgtaggtatacacgtgccattgtggtttgttgcacccatcaacccatcatctacattaggtatttctccgcatgctatccctcccctagctccccacccaccaataggccctggtgtgtgatgttcccctcactgtgtccatgtgttctcactgttcaactcccacttatgagtgagaacatgcagcgtttggttttctgtccctgtgttagtttgccgagaatgatggtctccagcttcatccatgtcccagcaaaggacataaactcatccttttttatggctgtgtagtattccatggtgtatatgtgccacattttctttatccagtctactgttgatgggcatttggattggttctaagtctttgatattgtgaatagtgctgcaataaacatacacgtacatgtgtctttatagtagaatgatttataatcctttgggtatatacccaggaatgggattgctgggccaaatggtatttctggttctagatccttgaggaattgccacactgtcttctacaatgtttgaactaatttacactcccaccaacagtgtaaaagcattcctatttctccacattctctccagcatctgttgtttcctgactttttaatgatcaccattctaactggcatgagatggtacctcattctggtttcggtttgcacttctctaatgaccagtgataatgagcattttttcatatgtttgttggccacttaaatgtcttcttttaagaagtgtctgttcatatgctttgcccactttttgatgggttttttttaattgtaaatttgttcaagttccttatagattctggatattagctctttgtcagatggatagactgcaaaaattttctctcattctgtaggttgcctgttaactctcatgatagtttcttttgctgtgcagaagctctttaggttaattagatcccatttgtcaattttggcttttttgccattagttttggtgttttagtcatgaagtctctgcccatgcttatatcctgaatggtattgcctaagttttcttctagggcttttatgattttacgtactacgtttaagtctttaatacatcctgagttaatttttgtataaggtgtaaggaaggggtccagtttcagttttctgcatatggctagacagttttcctaacatcatttattaaatagggaatcctttccccatttcttgtttttgtcaggtttgtcaaaaatcacatggttgtagatgtgtggtgttattcctgaggccttttttctgtcctattggtctatatatctgtttcagtaccagtaccatgctgttttggttactgtagccttgtagtatagtttgaagtcaggcagcatgatgcctccagctttgttctttttgcttaggattgtcttggttatatggactcttttttagttcctgtgtaatagcctcttaagtgataatcttgcattaacttcatccctgtaaagtctattttcattacagcagacaggaaaaatcttattaaaatgttagttcatgcatatcacccttctactccaaactttccaatagttctccatttcacctggaggaaaagctgatgtatttaagaatggcttcgtttctctcttttcccatttctacttactctacttcagtaacattggtctccttgctatttctctaataggacatatacgcttctacctgagtgcctttatacttgctgtttccttggcctgaaacacatttctctcagttaactgcatggcttgcttttttaccttcttaatgtttttgttcatttacatttctgagaacatctctggcccttctatctaatattgcttctctgtctcaatacttccttattcatcattttctgttttctttttctccatagaattcatcattttataaaatttcacacaattttcttgtttactttctgtttccttccactagaatataaactctgtaatagcaaagaaatttacttattttgctcactgctgtatcctcagtgcctacagtagtacctgccacatagtagatgctcaatagatgctcaataaataaaacttaaatgaaccaatgaaccaatattgaatcttcccaccttgaaacacacacacacacacacacacacacacacacacacacacgctagtccctctttatccacaggggatacgttccaagacccccagtaaatgcctgaaaccacagatagtactgaaccatatgtacaaataacaaatgtaatgttttacctcatacatacataccaatgataaagtttaatttacaaataaggcatagtcagagattaacaacaataactcataaaatagaacaattataacaatatactgtaataaaagttatgtgaatgtgatctctgtctctcaaaatatcttattgtaccctactcacctatttctcattgcaattgaccacagataactgaaactccagagagcaaaaccatggcagataaaaggagaaaatggtacgtgtgtgtatatatacaaacacatatgcaaacttgttttattttttaatatggcttggtggttttcatcttcgagatatccacaaaattgaatttaatttttaaatttaattccataatttataggtgagatagatttatatttattgttatggagagatgccaatgatatatttttatgaaaaaaagaaattcagaacagtatgtagaacatgacttcattgtgataaaaataaaaatgtgtgcatgtatctatgtttcagagtagactttccacatctcccaactagatgttgggcatatactgaagataaggtaacagaaggaaatcttgtaattcagggaagcagccagaagttttctgagcacaatgaagcagagatggtattcaaagagaaaaccaattagcaggataaatgcttcagattctttttaatacttgaacctctgtctcctttacaccatccctcccctccctgctagtctcatccagaagggaaatctgatcactgacaacccaccccagagattaagattaggaacagagctggaagaaacagcaacaaggaaaaggaaggagaggaaggaaggctcaagggagagaatggaggctcccatgcctgaactaaatgtgagttgaatccctgttccctgtggaactagatgggctgggaaagacttgaacattaaatagattaatctctcttgtttttttatgtattctaattttatggtaatgtggtctctgttatattgatttacagtatcttttgcatgtaatttgaggctatatgttgtcaatttttggaatgttttatacatgcataggagaattgctttctctaatgtgtagatacaagatttcatatacatacatgtttgttacatgacactagttaattgcattatttaaaaactctatatccttactagttttctgtgttgtaacctatcagtttctgaaaatggaggaggacctttaaacattttttttaacctagatactcaaattcaagaaacaatgaatcctaaaaagactaaataaaaagatatctacatctagaaaggactcagtgaaacttcagaacatttaaaatactgtatttcttactcatttttttttgtttgtttattgtatgtctcccactagaattttaagtcccataagagcaggcaggaaattctgcctattttgttcatagtacctggcacatagcaggcactctacaaatatttgctgaagtaatggattcagttcttcccctgcttcattcagggttcagttttcttcttactgaagttcatacttcaatccctcttttagggagagtcttgggtggtaaattttcttagtcctcacaactagaagtttctattttgtttttactcttcaatgagagtttagctgggtcaagtcctatataatgagttatttttttttcttcagcagtttgaatctattacttaaagaatttttttctggcttttattgttttcgagaattcggttgtgagtctgatattctttggaagataaccagtctcctatctcttggaatttttttgtttaattaaatattttttcctttgagataattgtgggttcataagcacttgaaagaaataatacacagagaacacttgtatccttttcccaacttatctcaatagtaacttcttgcaaaactataatatactatcacaaccaaatattgacattgatacaataaagacagagaacatttccatccccacaaggatccctatgctgcccttttacatctactttcctctcacttaaaccccctccttaagccttggcaactactaatctgttctccaatcctataattttgtctttgcaagaatgttatataaatggaattgagagatacaatatacaaactgagacaatgaatatgcaataataatagaactctgactcataacctctgtagcaacttgcccagaagtcaaaccctaacctctgcagcagttggcccaggtggtcagcatttggtcaatgatggagtttccttattttttgttcctacttccaatttaggacaaatcaaggaaaactaaattctccccaaagtaaccatataaaatacttcacttctaaccagttcttactttcattatttttttcttcctccttgctttgagcttatttgctcttcttttgctgggttcttcaggtaggaacttaaattactgatttgagatattttcttctttctaatctatacatttagtgctataaatttgcttttcatttgttgccaggtcccacaatttttgatatgttgtgtttttattttcattccatttcatatatttattttcctcaagacttcctttttgacccattcatgaagtatgtgatttacttctcaagtattaggagatttttctgttattgatttctaatgtaactccattttggccagagaacaccctccatatgattttaattctttaaaattagatgacgtttgatttatagtccaggttatggtctaggtcccacaggcacttgaaaagaatgtgcattctgctgttgttgagtgtagggttctataaatgtcaattagatcctgtcggttgatggtattattgcattcttccacatccttgatgttctctgtctagttgtcctatcaattgttaaaaaggggttgtcgaagtctccaactataattatagatttgtctatttctcctttcaattatatgagttttgcctaacatattttgcagctctgttgtgtggtacatatgcacttaggattgttatgtccttttggtgtgttgattcttttatcattatataatgtccttctctgtctctttaaatttatttgctttagagtctactttatctgatgttaatgtagccacttctgctttcttctgatcagtgtttgtatatctttttccatccttttactttaacttgtctatattcttatatttgaagtgagtttcttatagagagcatattgttagcttacgttttctcaattaactctgctaatttctgtcctttaattggtgtatgtggactatttagattcaattacatttttatatattaggttttaaatctctcattttatttttatttttgtcctttttggttcattttctttttcttaatttctaatgggttacttgaacattttttagaattccattttggtttatctatcgtgttttccagagcattttttttttttttttttttttgagacggagtcttgctctgtcccccaggctggagtgcagtggcacaatctcggctcactgcaagctccacctcccgggttcacaccattctcctgcctcagcctcccgagtagctgggactacaggcgtccgccaccacgcccggctaattttttgtatttttagtagagacggggtttcaccatgttagccaggatggtcttgatctcctgacctcgtgatctgcccgccttggcctcccaaagtgctgggattataggcgtgagccactgcacccggcccagagcgtttctttgtatacctttttaaacactgatttctctagatattacattatataaacaaaagttatcacactctcctgggggcgtcattttcccagttctagtaaactacagaaatcttacctccctttacactagtttattgtcccccatttataactattttaaacttctcttctacataaatttagaacctcatcagacattgtcataatttttgcttcaattgttaaatataatttagagaacacaacagaaaaaagaaaatctgttgtatttacccacatttttgtatattgccttttttcttccttcctcataaggtaagatttcttcttttataattttttttctctttagaggatttcttttaatcattcctttagggttgattggctgataacaaattgtcttcttttccaacatctgaaaatgtcttaattttccctttattctttctaaacatttttattataaattaataatttataactaaatgtatttatgtggtacaaagtaatattatgatttatgaacacaatatagaacaattaaatcaaattagttaacatatccatcccctcaaatacttgtcattttcataatgaggacatttgaaatttactctcttggcaattttgaaatttacaatacattattaactatattaaacatgcagtgcaatagatctcagaaaaagaccaccacccaacttatttctcttgtttactgagactttgtatgctctgactatcatcttctcattcctccaacctcccacggtctggtaaccatcattctactctctgcttctatgggtttgatcatcttagattccacatgtaagtgagaacatgtatttttctgtgcctgccttatttgacttagcataatgttctccagttccatctatgttgtcacaaatgatacttttcttctttttatagactaaatagtattccatgatgtatatatgccatattttctttatccattcatctgttgatggacacttagactgattccataacttggctattgtgaatagtgtggtaataaacatgggactgcagacatctctttgacaaactgattttaatgtctttgtgaatatccagaagtgggattgctgaatcatatggtagttctgtttttaacttttagaggaagcttcatactgttttccataaatttacgtttccaccagcagtgtacaagggttcctgtttctccacattctcaccaacacttatctttggcttttttttttaataaaagtaattctgacaggtgtgagaggatatttcttgtggctttaatttgcattttcccagtgattacaaatgttgagcatttttcatatatctgctgactatttgtattacatgccttcttttgaaaaatgtctattcaggtcccttgctccttgtaaaattctgttctttgttttctttctattgagttgtttcaatttcttatatatttgggatattaaccctttatcagatgtatagtttgcaaatattttctttttctttttttttttttttttttttgagacggagtctcactctgtcaaccaggctggagtgcagtggtgtgatctcggctcactgcaacctatgcctcccaggttcaagcaattcttctgcctcagcctcctgaatagctgggattataggcatgtgccaccatgcctggctagtttttgtgtttttagtagagacagggtttcaccatatgggccaggctggtctcgaactcctgatctcgtgatccacctgcctcggcctcccaaagtgctgagattacaggcgtgagccactgcacctggccttagtttgcaaatattttcttctcatccataggttgtctctttacatggttagttgtttcctttactgtgcagaagctttttaagtctaatataatccaatctgtttatttttgcttttgttatctgtgtttttggggtcaaattcaaaaaattattgcctaaaccaatgtcatgtagtttttctcctataatttcttctagcggctttgcactttctgttcttatgtttaagtctttaattcactttgagtcaacaccataaaggccatataggataagcccacggctaacattatactcaaaaataaaagatgaaaagtcttccctctaagatcttgaacaagacaaacatgtccactctcaccacttattattcaatgtagtattgaaagtcctttgtcagagcaattaggcaagagaaacaagaaaaggcatttaaatagaaaaagaagaagtaaaattgtcactgtttgctgatgacataattttatataaaaatcctaagactccttcaaaaaactgttaaactaattaaaaaatacactaaagttgtgggatacaaaatcacaaaaattggtatcatttctatacaaaaacaacaaactatacaaaaaagaaatcaagagaacaggaaaaggtagagcaagatggcataatagaaccctctgacaagtatcccccaacaagaacatcaaattgaataataattcatgtaagacaacaccttcacaagaactaaagaaatcaggtgagagatcatactacctgattttaccataataacaagaagaggcacattggagaggggaggaaggacagtcccacattgcctgtacactgctcccccaaacttgggcagtacagcacagtgcagagaaagaatctatcagtttgggagagagagagaaaagtgtgtgtgagactttgcattggaacttagtaccaacttgccacagaaaaatacaacatggaatagaaacctgcagcccttgattccaggccaatgtccacagagggtgtacttagacctatccctggctaaaatggaatctgctgctgcagctggaagaaactgagccctgaaacacttcaccattggctgactcaagtgtcctcaggtcctgaataaattgcagcggaaggcaaattggaaattcaaaatagctattttgaagatgctcaacaaatttcagtaaaacacagagaagcaattcagaaatttatcagagaaatttatcaaagatattgaagtattaataaaaaaacagaaatcctggagtaaaaaaatatggatgaattgaaaagtacagtagagggtctcaatagcagaactgattaagcagaagaaataatcagtgagcttgaagacaggctatttgaaaatacacagtcagagagggaaaagcaaaaagaatgcaaaaggacaaagaacacttatgagctatataagatagtatcaaaatagcaaatgtaagagtcattgcccttaaagtcggagtagaaaaagagaaatgggtggaaagcttatttaaagaaataataacaaaaaacttttcaaaagagaaatatataaataggtaggggaagcccaaagaccaccaagtagatacaactcaaacaagactatcttaaggcatataataaactctcaaatgtcaaaaacaaagggaggatcctgaaagcagcaagagaaaagaagaaaacaacagataaaggagctccaatatgtctggcagcaggttacacagcaaaaaccttatagtccagaagggagtgaaatgatatattcaaaatgatttagaaaagcccaacaactgagaatactatatctggcaaagctatccttaaaacatgagagagatgtagactttctcagacaaacaaaagtttaaagacctcattactaccagacctgacttataataaatactaaggtgggatcttcaatctgaaggaaaaagacacatgtgcaacaagacacatgtgcaacaagaaaacatctgaagaaataaaatccactgacaaaagtatatactgtaaccacccatatctttagtgtaagtaccaaaagataaaactactaaaaataataattacaatgatttgttaaaagataagcaatataaaaagatgtaaactgaaatatccaaaagacaaaatgtagggataagatgagttaaagagttttattttttgtttcttttattgtctttgcaattaaagtcaggttatcatcagtttaaaatagcttattatagctatacatttttttaagcctcatggtgactacaaagcaaaatctataatggataaactaaaaataaaaagcaagtatttaaaacatactaccagacaaaataaacccaaaagaagacagtaagagaggaataaaggaatagaggagttataaaacaatcagaaatcaacaaaatggcagtagtaagttcttactactatttataataaccttgaatatatatggactacattctctagctgaaagacatagagtcactgaatagataagaaacccaactatatgttgcctacaagaaactcatgtcacttataaagacatgcatagactaaaagtgaaaggatggaaaaagatacaccaagcaagtggaaaccaaagagggcaggagtagctatacttatatcagataaaatagactttaagtaaaaaataattttaagagacaaaatgctactatgtattgatgaaagattcaatacagccggaggatataacagttgtaaatatatatgcacccaacactagagtacctaattatataaagcaaatattaacagacctaaaggaagaaattgactgcaatacaataatagtaggagagttcaacacccaacttcagcaatgaacaaatcatctagaccaaaaatcaacaaagaaatattggaattaaacgacagtctagaccaaatagacttaacagatattataaaacataccactaaaaagctgtagaatacacattcttttcaacagcacatggaacattgtctaagatagaatgtattttaggccacaacacaagtcttcacaaatgttacaaaattgaaatcatatcaagtatcctttctgatcacagtgcaataacactagaacaataacaagaagaaatttggaaatggttcaaatatatagaaattaaacaacttgctcatgaaaaactaatgggtcaatgaagaaagtaagaaggaaatttaaaaatttcttggggcaaatgaaaatggaaacaaaatataccaaaacctatgggatacagtaaaaacagtttggaaagagaagtcattgtaataaatgcctacatcaaaatattaaaaagatctgaaataaacaacctaacattatacctcaaggaactagaaaaataagaacaatataaacccagaataagtagaaagaaagaaataataaagatcagagcagaaataaatgaaatagagacaaaaaatttacaaaagatcaacaaaacaaaaagatggttttgaaaagacagacaaaacgaataatcctttagttaggctaataaagacaaaactcaaataaataaaaacagaaatgaaaaagatgacattataactgatgccacagaaatacaaaggatcataagaaactactatgaacaactacacgtaaataaattggtaaacctagaagagagtaataaattcatggacatgtacaacttaccaaaattggatcatgaagaaatagaaaaactgaacagaccaataatgagcaatgagataggcacagtaataaaaagtctcccatcaaagaaaagtccaggaatggatggcttcactgttgaattctaccaaacatttaaagaagaacaaatatcaattctacttaaactcttccaaaaagctaaagtgaaccgaatagttccatattcattctacaaggccagcattactgataccaaaaccagacaaggacacaacaaaaaagaaaactacataccaatatctctgatgaacttagatgcaaaatcctcaacaaaatactagcaaaactaattcaacaacacattagaaagatcatttattatgatcaaataggattcattccagggatgcaaggatggttcaacatatgaaaatcaataagtatgatgcatcacattaacagaataaaaaacaaagactatgtgatcatttcagtagatgctgaaaaagccttcaataaaattcaacatctattcatgataagaacttttgacaaactgagtataaaggaacatacctcgatacaataaaggccttacatgacaaaaccagagctaacattatatggaataggcaaaagttgaaaggtttttctctaagatctagaacaacacaagaatacccacgtttaccactttatttgacatagtactgaatattctagccaaagcaagtaggcaagagaaagaaacaaagggcacccaaattttaaaaagtggaagtcatattgtccctgtttgcagatgacatgaccatatacatagaaaatcctaaagactccactaaaaaactattagaattaataactgagtatagtaaagttgcaggatacaaaatcaacacaaaaatcagtagcatttctatatgctaataatgaactatctgaaaaagaaatcaagaaagcaattctattacaatagctacagaaatgctagacataataaccaaggaggtgaaatatctctacaattaaaaccataaaacattaatgaaagaagctgaaaaagacaaataaatgaaaagacatcctgtgttcatggattggaagtattaatattgttaaaatgtccatattatccaaagtaatcttcaaattcagtgcaatttctgtcaaaataccaatgatattcttctcataaatagaaaaacaatcttaaaattcatgtggaagtgcaaaagaccctgaattaccaaataaattttgagcaaaagcaacaaagctgcaagcattacactacctgacttcaaaatatactataaagctatagtaaccaaaacagcatggtacttatagaaaaacagaccaatggaacaaaatagaaagcccagaaagaaatccatgcacttttaaccaactgttttttgccaaaggtggcaagaatgcacactgagaaaaaacagtcccaataaatggtggtggaaaaactagatagtcacatgaagaagaatgaaactaggtacttatttttcactataaacaaaaatgaactctaaataaattaagacaaatacaaggcttaaaactatgaaactattagtagaaaatataggggaaatgcttcatgaaattggagtaggcaaagatttttcgaataagactgcaaaagcacagaaacaaaaccaaaaatagacaaatgggataatatcaaactaaaaaacttctttacagataaggaaacaatcaaccgagtgaagagtaaaatatggaggggttgttgcaaactatgcatctgacaatggattattattcagaatatataagaaactcaatgattcaatagcaaaaaaagaaagaacaaaaactaaataataggattaaaaataggcaaaaaacatgaatagacatttctcaaaagaaggtatacgaatggccaacaggtatatgaaaaaatcttgaacatcgttaatcatcaagagaatgcaaatcaaagccacaatgagatgtcacctcaacccagttagaatgaatatcattaaaaagataaaaaaaacacaaatgcttgtgaagatacagacaaaagggaattcttgtacactcttcgtaggaatgtaaattagtatagccattatggaaagcagtatggagatttctcaaaaaattaaaaatagagctaccatatgatccaggaatgctattactgggtacatatacaaaggaaatgaaatcagtatgttgaagagacatctgcacttccatgtttattgcagcactattcataatagccaagataggaaatcaacctatgtacccatctacagataaatgtataaatctatgtggaatctaaaaaagttgatttcatagaagtagagagtagaatagtgattaccagaggctagggatgggaggcgggagaggagaaccaggaatggttggccaataggtacaacattacattaggcagaaataataagttctggtcatatattacatagtagggtgactttagcaaataacaatgtagtgtatatttcaagatagctagaaaagaagattttgaatgttgtcaccacaaagaaatgaaaaatgtttaaagtaatggatataatactttacaccaactcaattattataccatatacacaagcaatgaaacatcaacttgtactccctaaatatgtacaattattgtttcaattataaattctaaaattaattaatcaaagaagaaatcaagagaacaaccatattttacaataaaataaaatgaaatacttagggatacatttatctaaggtagtaaaagacctgcacactgaaaactacaaaatattgataaaataaactgtagaagacataaataaatgaaaatattttccatattcatggattggaaatattaatattattaaaatatttattcttgccaaagcaatctacagagtccatggaatccatatcaaaattccaatgttaaaatttttcatagaaatagaagaaacaattctaaaatttatatggaactacaaaaaatcccaaatagccaagacaatcatgagcaaaaagaacaaagagttattaaaccacctgatttcaaactattacttaaagttatagtaatcaaaacagcatggtactggcataaaacacacatacagacaaacagaatagatagcccagaaatgaacatattcatgtatagtcaattgatttttcacaaaggtgccaagaatacccaatgggaaaaggatagtctcttaaacaaatggtgttgggaaaactagacagctactttatttctaaaagatattttcactggatatcagattgtagttctctttcagcacttgaaaaaatgtagagccacttccttctggcttctgtaatacctgatgcaaaatccattgtcattcatacctctttgtatggaaggagtatgggttccttgttactgcttcccacatggccttcagtgactctatgttgcggggagggcttgtttctgttgggtggtagcgacagttctgactctccattaggcctcttatacccctaatagggaggacaaggggcaccttatcaccgccagggtgttgggggagtggaaacccagcatcatcctcatgtggtttacacagacacttcagggcagggggctctcattacaacatagttgggataaagtcctggcttcctacatggaattctctgatctcaccccagtgggatgttgagatatttcattacagacttataatttcattacagactcttataggtgaaagcataggctctccactcagccttggctggcatgggggctatggtagataatattatatgtaggatcaagaaaagctgtggcagctctgtattcagtgaacacctgaattctttattctggtgatgaaaaatcttttttatttttatgtttatttttttagatggagtcttgctctgtcacccaggctagagtgcaatgacatgatctcggctcactgcagcctccgcctcccaggttcaagtgattcttgtgcctcagtctcctgagtagctgggaccacatgtgtgcaccaccatgcccagctaatttttgcatttttagtagagacagggtttcaccatgttggccaggctggtctcaaactcgtaatctcaggtgatccacctgcctcagcctcccaaagtgctggggttacaggtgtgagtcaatggtcctagccttagaaaaaaatttttttgagacagggtctcgcactatcacccaggctagagtgcagtgacaccatgttggctcactgcagcctctgcctcctaggtttgagcaatcctcctacctcagcctcccgagtagctgggactacaggctgctctaccacacctgactaatttttgtatttttaatagagatggggttttgccatgttggccaggctggtctcaaactcctgagctcaagtgatccacctgcctcagcctcccaaagtgctgggattacaggtgtgagccactgcacccagctggtgatagaaaaatctaataaggagtacacagtataagcttcaggataccagtttgactctatacattgctactgtgtgatacacagaagcagaaatttactctttccaagcctcagctttcttatttgtaaaaatgatggctatagtaactaccttaaaggactgcctcctagctcacaacaggggctcaataaatgacacttgctatcatcatcataactgtcatcattgtcattgtaacattaactagaaatatccagcacagtttttttttttaaataaatgtaagtcacatataaactagattctggctccctacgttaggatactataatagttagtagctgttctctaaggatccagaattgctatttaagccaggagtcataaacaggccccagagctgtgtgtgacctgcagaaaacttcttctcattaaaaccactgtattttcccttggggtttggactcacttcaggaatagctaagcaggttgtggcttcttaaggtcaaggcagacagtcaaaaaacctcttctagccatttggctcttactcggctgtgtcccagctgggccagttgggcatgtgacagggcaatggtccatttcaacaactcagtgcagctccagcaggcttttcctacaccatatgttgctagagccaagcaacaacctggtgagatagtgaggatattttgcagggaactggggacaagggtgaaggctcagagaggtaataacttgcgtaacccagcaaataagtggctgagtcaggaggggactcagtcattcaacctatatttcgtgagtaacagttcagtttggcttcctccagaagccaactctgagtcaaggatctggttgagagtgttttttcatgagagacgatcccaggaaatattggtaggggagtagggaagtcagaaaggaacagaaggcccccagtgaataatgaattcttaagcagtttagtacagggggccactggagcttaagcctcctgtagaccatataactcagccttatcccactttagggtgaagaaagccactatagtatttatccaccaaccctgacagtccttggttgaggctgctcccaggagtgttaattccctggggcctatgactctctgcctccaagacccgctctgcccaacacttcagatgctgatgtttggcagccagtcaggcatgcatgtgaatggtgaggagtgaggctctgcacagggcatttactttaatgtatcatatactcagcactgtgccaactgcaagagatgcagtggtagtcaagacagacatagttcttgctcttatggattttattatttaatgggaaagaccaaaaagtatataggcaattacaatgcagggtgataagaggtgcaatgatggaagtatagaattcttgggaacctatataggaggagtccttgtcccaagactgaggtgggtgcagaagagactccctagaggcagtggtatgttagtgatttaagtcaccactgtctcacctgtcttacctttgagtttccacaattctgttccctttgtacaaaataatctccatcttcatctgggcgtctaataacattcttcaagacttacattatatgtcacttcttcagagagatttttctgaatcttcccagtgggttttactttcaagctatatgtttccatagtaatcagtattcatattaagattaaataggagcagtgcctgcctttttaaatgttgtatccccagtacttgcccagtttctgacacacaggcagtcattatttgtggaaagaaggaataaatgacctgtctatagaaaaagctacactctgtgttgaggctggggccacaaggaagtgtgtattgtaattgggggtgtaaccactgacaggctctgccttataagaactgattctctatggctgaacgtgcaggtttgaattcaggaatgatatgggaatttctaagttctctgaagcaaatagtaatactctgccaaaaaatggaaaagaaataaaggttacttttagtatccatctcccaccttcccacaagttcaactccatatttcctgcattgctactacatgccaggattgtcttttgatgacttagaagaaaattctatgcagcttccattctagtgagcaagatagtgagcttaagaatacataagagataaaacattcccaagaagatatgagtaagaccagaacaggggaaatgtcaggaatcatgagcaaaacacaaggtgggcaggcacacaggagagcaagatttcccctccctgacttcttagaggtagcaggaataatttattactgttgggtgtgccagaacttcataaggttttcaaaccagcaatataaaaccagcaatatagatatgccatgcttcaatttgttctgaggcagagttcaaatttcaacactctagtcatgataaaaaatgaaaacactcaatgacaatttttgtgagtggttgggcaggaataactggaatcctggaataaggataaacagtcactcagttatttttcaggaccaaggacagtaggatgtgtgtacaggtgtgctcagaagcatattctcatgcagttattaattaagctaggcctatgacagattcacagataaaatgctctcaggtcatcagagaggaaaaaagtatttctagttggcagacggggaagccttcacagaagacaatttgggctttgctttaaataactgggaaaaaattgagtttaagaggaagtcattatggggcatagcttaggcaaaatcagagtttgaaagtgtagggtataattagataattaggttcttctaagtcgtgtgatgtgggtgggctatagtttgcatggaagaaagtgtaaggaaatagaagtggaagagcaaggtggatttagggaaatggaacaacttcagcaccacactgagaagacgggattgttaccctgttggcactaggcagctcctgaagatccctaaataggagtatggtttgcccatagagaattctcatggctgtatggaagaatgatttcagtagggccagaaaaatgagttaggaggctagaagaacagtgacaaagagggcctggacttcagcagtggcaggagtaatggaaaggaagaaactactgataagtcactatggtacctgggtgaggacagagagaaacaagtgaaaggcaatcctgaggtttccaatatggggcccagtggatggtgtcattaacagcaaggaactcaggagggatcaattctccctcccactgtctcctctcctcactccatgtcccaccaggcctcacactcctggacctttccagatccccagtttctctctccctccaggcctgccctacttggtcaatgccaactcctctgccccactgtctttaggcagactggctttatgactttgggaagaatcacttaacctctttgaccttccatttccaccttttaaaattggaagactcaaacacgggattgcacccaactctaaagttctagattttttccagtttacttctaccagtatgaaatgtactcagttgttaaacattcagagtatccccatcttctcaccaggtactggcatttaaaaaaggcatagtgccttaccaagaaacccagcaacaattgtggggtttcatggagcagccatggagataggtctgaaaaagaaggggataacttggattcagaggggcccttctgattctcaaatccttttccagagccactctctactctgacccctggtaaaaaacacttgtgtctatcaacagcagccatggtatgaatgagggaatccaactgggctgcctgcacaaggcagtaagccctccaggtagacattctgtataagactgactgagcaagcacagcacccatggacatggcctttcagctgtgccttacacatccctgacaatttcaagtacccaacttgaacctactgaatcagaaactggggatggggcccagcacttccctttttaacaaaccctgcagttgatcttgatgcatgccaacatgtgagaccaatacattaaaacatggagtaataaaaggaaaaatactactgctaaataatgcatgaatatattcattattttaagctaacagtagactcagtaatataatgtggtaaaatttttagaatggatagaatttaatttttgcgaataaagtagatatttccacaaaacctagcaacatctctatagacaaaggaggaaagaaattacccagaagccttaggtaaaaaaattcaggtaattaaggcaaatataagtgctgggttttgatttacatcctctaaatgtgtaggttccaagacctactctttctctttttgaaagcaatgcaaagtttgatttaaatgaaatctaaactgaaaccccaaaggtaaaacagataattgagttgtactctagggaaacaaagaggggtcatatctctgcctcccactccttctcacaagtgtgcagagggctccaggcaaggctcattatagcagaaaataactttaagtccctcttcactttacataccccatacaaaggccacagggaaagtatcatattcctgggacaggcattttaattaagatgaaaagaaaatgtgttttgttgagattgtgtttttctctaaaaactgagagtgaagagaagtgaggtaaacctcatctaaaaaagttcctttcagggagcacaattcaggtgcacacagtgaaaatgcaggtgcttcaatcgtctttgcagctgggagactgaagcacctgcccaggaatgtgctcttagtaaatatccttaattgagtcggacaatctgggaagcctatgaaattgccagcccaggaagtgggagtgactcagtctgtgtctgttctgtttgggcagatgcaactaaataagggggctttattgcttcagagcttttcctgaaaagagaagcccacctgtatttgcatgcacatttgcagccttctagaaaaacagaaacctgatttgccagctgttcagtcttctcagaactctgtgagtcaagtctcctttggaaaacatccagttttacagaagtgttcagccagaaggggatttaggtaacttctagtccagtggtttttgaactatttttgttttagaaactaaactcttctttcaaaagaaattaaccagaaatagattaaaatgactttattccacttgccccttcagccttctcttttttcccccttatcactcactgatcctgagggattcagcaaaacctagtttaaaaaccactgattcggtgtttaaaaagactgaagcccaagaagcaaaaggccttttcaaaggtaacaggagtagaaagtgtcagagcgggaacccgggaggcggagcttgcagtgagcagagatcaagccactgcactccagcctgggagacagagcgagactccatatcaaaaaaaaaaaaaaaaaaaaaaaaagagtcaatctctggttttgagatctttcctgtgcaattcttcaggcctatataattgtttatttggctgtgcattcattgtttgagcaaatgtttatgaaacaccttttatgtccaagcactagctagctgctatggactcagtgataagcaaaagaagatgaggctcctgccatcacaaattctacagtagaataaagatattgattaaatggtcacacaaataaatgtaaaataaagaggatgatactaaggaaggtggtaaaaatgatgtctagcttatgatttgtggacagtgacagtgaatattgcattagaccagatctgaatcctcccacatttgccagccccatcattctcagccctggatgcatattacaatccactttggagttaaaaaacaaaatatcaatactcaaggcctatccccagagattctgatttacttagttgggatgagatctgggtattggtcttttcccaggctcctcaggtgattctcacatgccactaaggttggaaatcactgctgttagcaatccctctcaggggaccttatgtggcttcttctctatttgattgtatgacaccaggaataaacagaagcaaaatgattcatctcccagaagggaacagattcccaggaaatcctggtaaatatggcatagaacatgttactgaccacacttggtcagttgaatgggtgggaagcagtgcaatagaatagaaagggccccaaactcacagataaatcctcagatgtgctgctaacatgtccccttcccatgtgtcatatgaaggcattgggccagaccaatggtttacatactgcatgtaaaggccacagggaaagtcttgaaacttgaacttccatcagcttcacctagaagctttgttcaaatacagattgctgggctccaccctcagcctctgatggatgaggactgagatgggacctgaatacctgcattccaaaaaaaaattctcaggtgctactagtgctgctgatttagacaccaaggctgtgatgatggtgactttaacagacagagggattccaagaggaatctattctttaagataacaatcctgtttctatttacattttgacattctatttatcacaaacttttgcattacttttgattcttctaaatatggcattaagatattgtttatcataactgctgagctttttggcatccctttacattttgcacctaggatgagtgcctcattcacttgattctaatccctgctgttagttcaatcactgaactaaatgaccctctaagggctcttcaagtttgaacttctttaaacagagaggcagtagggatggtgacaaagagaaaaagctccggagccaagctcccttgttcctgctcctgtaaatgtgttctgccatttacaagctatgtagccttgtggaagttgctaagcctctctgggcctttgtttttccttatccatgaagtcaagataatattaggttggtgcaaaagtaattgcagtttttgcctagatcccttgcatgcacagttcacaatagagttcatgctcatattgtgaactctattatgatcagtaactattaggttggtgcaaaagtaattgtggatttgccatttttaatggcaaaaaccacaattacttttgcaccaacctaatacttactgatcacataggtttatagtaattgattgagataacacccatagagtacatagtgtgtggttttagcagtgagcaccatcagcaaatgtcccttggtttaatcatctcctgagggatttccctcctgactaggttcacactgatttcttcaacgcctaaggggaatctttatgtttcttcaaggcagcatattataaatcaagttacacagcctcttggttttcctgattttccaatttgtccctggtgggtttgcattttctttattccaaagagttagtgagagatgaagctggctgggcttctgggtcaggtggggacttggagaacttttctgtctggctaaaggtttgtaaattctccaatcagcactctgtaaaaacagaccaatcagcactctgtaaatagaccaataagctctctgtaaaatggaccaatcaccagggtgggtggggccaaataagggaataaaagctggccacccaagccagcagtggcaacctgctcaggtccccttccacgctgtggaagttttgttctttcgctcttcacaataaatcttgctgctgctcactctttgggtccgcactacctttatgagctgtaacactcactgtgaaggtctgtggcttcactcctgaagtcagcgagatgatgaacccaccaggaggaagaaacaactccagacacgccatctttaagagctgtaacactcactgcaaaggtctgtggcttcactcctgaagtcagcaagaccacaaacccaccagaaggaagaaactctggacacatctgaacgtcagaggaacaaactctggacacaccatctttaagaactgtaacactcactgtgaggctctgaggcttcattcttgaagtcagcgagaccaagaacccaccaattccagacatattttggtgaccatgaagggaccatcgcctatcgccaagtggtgagtaccatcggacccctttcgtttgctattctgtcctatttttccttagaatctgggggctaaataacaggcacttgttggccagttaaaagcaactagtgtggctaccagactaaagacgcgggtgccaggctttctgagaaagggctttctaacaacccccaactcttcggagttgggagcattggtttgcctggaaccagctgctgcttttcctgtacttctgggctgagccaagggtcaacagagaggaaagccattcagcttcagggtcctgacaacaagttggttgaccctgcggccatgagcggaactctcaaagtcatgtcgcccaagtgagactcatccatctatcttatctatcctgacccttgcctcctgggtcctaatgcctgtcaaacttcctcttgcctctcttctccgaggctagtcccgcttctaaaaaccactccctgtctctggtgcttttctattttctcctgtaagaatgatttctagtataaactccaggactctgttaccttctttaggcacctgggctcaccgatcagaaagacataatttttgcccaaagccctgttgtagaggggattatctggaattttaggatccctcttcagacaagcaggcctaacaaaagctactcctgaagctaggatatggggagcctcagaaattgtatccttctgttcatataagtgaggacaaaaggcatcactcttccaactctggagatcccttccatcccacagggtatggccctccacttcatttttggggcataacatctttataggaaatggataaagtcccaatactaacaggagaatgcttaggactctaacaggtttttgagaatgtgtcagtaagggccactaaatccgatttttctcggtcttctttgtggtctaggaggacaggcaagggtgcaggttttcgagaatgcatcagtaagggccactaaatccaaccttccttggtcctccttgtggtctaggaggaaaactagtgtttctgctgctgcgtcggtgggcgcaactcttctgatcaccagggtccagggaccattgcgggttctcgggcaagagatgtttctgctgctgcattggtaagcacaactcttctgatcagcagggtccagggatcattgcaggtttttgcgcagggggagaaacaaaccaaaactgcaggtggttttgtctttcagatgggaaacactcaggtatcaacaggctcacccttgaaatgcatcctaagccattgggaccaatttgacccacaaaccctgaaaaagaggcagctcatttttttctgcactatggcctggccccaatattctctctctgatggggaaaaatggccacctgagggaagtataaattactatacgatcctgcaggttgaccttttctgtacgagggaaggcaaatggagtgaaataccttatgtccaagctttcttttcattgaaggagaatacacaactatgcaaagcttgcaatttacatcccacaggaggacctctcagcttacctccatatcctagcctccctataactccccttcctattaatgataagcctcctctaatctcccccacccagaaggaaataagcaaagaaatttccaaaggaccaaaaaaacccccgggctataggttatgtccccttcaagctgtagggagaggggaatttggcccaacccaggtacgtgtcccttctctctctttaatttaaagcagatcaaggcagacttggggaagttttcagatgatcctgataggtatatagatatcctacagggtctagggcaaacctttgatctcacttggagagatgtcatgctattgttagatcaaaccctggcctttaatgaaaagaatgcggctttagctgcagcccaagagtttggagatacctggtatcttagtcaagtaaacaatagaatgacagctgaagaaagggacaaattctctaccagtcagcaagccatccccagtatggatccccactgggacctcgactcagatcatggggactggagttgcaaacatttgttgacctgtgttctagaaggactaaggagaattaggaaaaagcccatgaattattcaatgatgtccaccatagctcagggaaaggaagaaaatccttctgccttctaccttcctcgagtggctatgggaggccttaagaaaatatactcccctgtcccccaactcactcgagggtcaattgattctaaaagataaatttattacccaatcaacagatatcaggagaaagctccaaaagtgagccctgggccctgaacaaaatctggaggcattcttaaacctggcaaccttggtgttttataatagggaccaagaggaataggcccaaaaggaaaagcgagatcggagaaaggccacagccttagtcatggccctcagacaaacagaccttggtggttcagagaggacagaaaacagagcaggccaatcacccagtggggcttgttaccagtgtggtttgcaaggacaccttagaaaagactgtccaatgagaaacaagccaccccctcatccatgtctgctatgccgaggcaatcactagaagacacactgccccagagggcaaagcttctctgggccagaagcccccaaccagatgatgcaacaataggactgaggatgcccagggcaagcaccagctcatgtcatcacccttgctgagccctgggtacatttaaccattgaggaccaggaaattgacttcctcctggacactggcatggccttctcaatgttaatctcttgtcctggatgactgtcctcaaggtccattaccatccgaggaatcctgggacagcctataaccaggtatttctcccacttcctcagttgtaatgactttgctcttttcacatgcctttcttgttatgcctgaaagtcccatacccttattagggatatattagccaaagctggagctattatctacatgaatatggagaacgagttacccatttgttgtcccctgcttgaggagggaatcaaccctgaagtctaggcattggaagaaacaaactcaagctccagccttaagccttcccacaggatgaaacttttctttatacatcacagagagaacaggaatagctcttgtggtccttactcagactcgtgggacaaccccacaaccagtggcatacctaagtaaggaaattgatatagtagcaaaaggctggcctcactgtttatgggtaattgtggtggtggccgtcttagtgtcagaggctatacaaggaaaggatcttactgtctggactactcatgatgtaaatggcatactaggtgtcaaaggaagtttatggctatcagacagctgcctacttagataccaggcactactccttgagggaccagtgcttcaaacatgtatgtgtgaggccctcaaccctgccacttttctcccagaggatggggaaccaatcaagcatgactgccaacaaattatagtccagactcatgctgccggatatgatctcttagaagtccccttggctaatcctgaccttaacctatataccggtggaagttcatttgtggagaatgggatatgaagggcaggttatgccatagttagtgatgtaaacatacttgaaagtaaacctcttcccccagggaccagtgcccagttagcagaactagtggcacttacccgagctttagaactgggaaagggaaaaagaataaatgtgtatacagatagcaagtatgcttatctaatcctacatgcccatgctgcaatatggaaagaaagggagttcctaacctctgggggaacccccactaaataccacaaagaaatcatggagttattgcactccttgcaaaaacccaaggaggtggcagtcttatactgctgaagccatcaaaaggggaaggagaggggagaacagcagcataagcagctggcagaggcagcagaaaggaaagagagaaagagacaggaagtcagagagagagaggaagaaacagagacaaaaagaagaagacagagagaggaagagacagagaaacagaaagtcaaagaaggaaaggaagagacaaagagggagtcagaaagagagaaagagagagacagacaaagaagaagtcaaacagagagaaagagaaatagtaaataaaaaacagtgtaccctattcctttaaaagccagggtaaatttaaaacctataattgataattgagggtcttctctgtaaccctataacacttcaataccaccttgttgtcagtgtaaacaagggaacaagggcataacccgaaaacactgaggccactgacaacccatagccttcctaacaaaaatccttaacccagcaggtttcctaacagggggatctaaatcttaattaattaccatacaaaggtctgaccacatctaggaggaactcccttcaggataggacgatggatggttcctccctggaaattaagggaaaaagacgcaatgggtactcaataagtgataaggaaactcttgtagaagcagagttaggaaaattgcctaataattggtctgctcaaacgtgggagttgtttgcattcagccaaatcttaaagtacttacagaatcaggaaggagccatctataccaattctaagttaatatggactgaacgaggtcttattaatagcaaagaataattggaatcccaaacttacaaggttttcaacaaaagtaaagtttgctaaaaaagttaacggtgtaacatgtattatcctaacttctaatcttatggaaatcagaccctatctgtgcccctcaaagctcaagtccatcaatgcaggggcatacaacgaatacacctacttatagggttaggaatggctactgctacagaaaccagaatagcaggtttatctatttcattatcctactaccacactctcagaggatttctcagacagtttgcaagaaataacaaaatctatccagtaaggatagtaactacaatcccaaatagactctttggcagcagtgattctccaaaaccaccgaggcctagtcctcctcactgctgagaaaagaggactctgcaccttcttaggggaagagtgttgtttttacacaaccaaaaaaagaggactctgcatcttcttaggggaagagtgttgtttttacactaaccattcagggatagtatgagatgccgcccggtgtttacaggaaaaggtttccaaaatcagacaatgcctttcaaactcttataccatcctctggagttgggcaacatggcttctcccctttctaggtcctgtgacagccatcttgctattacttgcctttgggccctgtatttttaacctccttgtcaaatttgtttcctctagaattgaggccatcaagctacagatggtcttacaaatggaaccccaagtgagctcaactaacaactactgaggacccctggactgacccgctggtcctttcactgacctaaagagttcccatccggaggacactacaactgcagggccccttcttcacccctgttcagcaggaagtagctagagcagtcatcgcccaattcccaacagcagttggggtgtcctgtttagaggggggattgagaggtgaagccagctgggcttctgggtcaggtggggacttggataacttttctgtctagctaaaggtttgtaaacgcaccaatcagcactctgtaaaaatgcaccaatcagcactctgtgtctagctaaaggtttgtaaatgcaccaatcagcactctgtaaaatagaccaatcagctctctgtaaaatggaccaatcagcaggatgtgagtgggccaaataagggaataaaagctggccaccggagccagcagtggcaaactgctcaggtccccttccacactatggaagatttgttcttttgctcttcacaataaatcttgctgctgctcactctttgggtctgcactacctttatgagctgtaacactcactgcgaaggtctgtggcttcactcctgaagtcagcaagatgatgaacccaccagaaggaagaaacaactccggatgtgccatctttaagagctgtaacactgactgcgagggtctgcggcttcactcctgaagtcagcaagaccatgaacccacaactggacacatctgaacattagaggaaaaaactctggacacaccatctttaagaactgtaacactcactgtgagggtccgcggcttcattcttgaagtcagggagaccaagaatccactggaaggaaccaattccggacacaatagtccataaggttaatgtaatgaaatgctgaatcttaaactaaactctttagaaaagcaagaaaaacctttggatcgattcttcttatttattgaacatcaatgaaataaatgaacagtacctcccaaagaggccaaggatcactcccatttatgttgagggacaaaaatatttgtataaagaggaagcagagaatgacattcattggatcttgagagggaagccatggtttgtgtaaatgtagtgactagttgtcaaattttttaataaattagtgctcccaacttatggactttttgtcaggctctagtttctttagaaagccatgtgagatgaagggatagggggaggaaacacaggcttatgaaggtctatgcataaaacatttatgaataaatgttaatttattcataaaatattttaattcataaaatatttatgaaacaccttatgaaggtctattcataaatcttcaccctggtgtctatgctgtctttcctcatgcctgctactgatcactgtttgtcctaactcaataggactttccactgtttgccaacatactctgtgaacctactcccttctgcataggttgagatgtttatctatataaaatgggcttccatgcttcttcatatcaaaatcttattcatgctttgagatctagctcaagagtcacctcttctaagaggccttcctcaaccccaccccccactcctatgtccctgtggttgttacagaggagtcagcctcatttaaggcacacctcagatgtttgagggtttctattcccacacatcatctttgataagttctttacatcccactgaaggagctcaactctagtttctgttttgttgattgtcaaactttaatcacagcaaaataacagaaacttagcttttggccagagaacctgatcattctgctactcagttcttatgaaaagcatcagtgtgggaagtgatattcacatcgtccttagattgcaccgtttgggcctctttactgatctatgcttgaatggtgtgtaatctatctgaactaagaaatattataaaaatgatcaccataaaatccattgctgcattacttttagaaagctcttagaaaaaactggccatgtgcttttattacctgctggagaaattgttctcatgattgaagatcaagaaaaactacactatttataagcaactggtgagctttcatcatgttgatagcagtgaattctgttctgttttcctctttaccctggcttggaaaaagcttggagtgaacattgaatagaatgttttgatgtgcattttaatgctgatcccattcctggcttcacattattttcctaattttatttactttttagtctcacctctatttttttcccttttgcctatatacttctgtaagacactttaaatccttgtatgaatgaggtaggggatacatacttagataattcatatttctttgaaagcagataatctaaatcctctttgttttgaaattctaatacttaatctagaacttgacatgttgtatacagttttaaaaataataagacgaaggatgaggtggaaggaaagattaagtttgctggcagaggtatctacatcctacttttacatctagacaaatgatgggaaaactcaagttttttttaggacatgcaagctacaccaaaaattttagaaaaactgaaaacctaaagatatcacttcacatgttttcaattcattttaatattgcacagactttaaggttacatacagatatttggcatacatagacatggctacaaattcaacaactatcccaagtgtaaaattattgttaaagtggttatttcctaactttctgaggcacatttatacatatttatatatatacacacacacatacacacacacacacacacacacacacacacacacatatatatataggacctggagataatttaagcattttttatactcactatagccattctaacacagaggtgttgtgactattaaatgagatgagaatgcactttgtaaagttaagaatcttaatcaagagcaaagtgaggtgtgcgtactcataaatacacactttacaagggcattcatttatctgtcagaaggaatttccaatttttgtggttgacataaaagggctataaatatggtgcataaaagcacacatacacaaacacaaacccagcaatacataaaaacaaataacagttgttactgagtacatgaactacttagagtcagctagactagtgatccccaacgtttttggcaccaggggccggttttgtggaagacaatttttccacagactggggcagggtggaagggggaatggttcggggatggttcaagtgcattacatttattgtgcactttatttctatttttattgtattgtaacatgtagtgaaataattatacaactcaccataatgtagaatcagtgggagccctgagcttgttttccttcaactagatggtcccatgttgggggtgatgggagacagtgacagattttcaggcattagatcctcataaggtgtgtgcaacctaaatccctctcatgcagttttcatagagcttacacttgtatgagaatctaatgtctttgctgatctgaaaggaggtggagctcaggcagtaatgcaagtgatggggtacaactgtaaatacagatgaagcttcactttgcttgcccgccgctcacctactgccctcctgctgtgtggcccagttcttaacaggccacggatcggtagtaatctgtggcctgggagttggggaccctgatctagactcctctatgtgtctcacacttactccatatccagttggttcacacatctggccactcccaacctactctacagctgccaccctggactgagctgcttcatggccagactcccaccattgctctcatccctgctcaaacattcttcacacagaagccggggttatccttcagaaacctgactcaggccttggcacttctctactcaaaaccctccagtggctgcccacgtcactgagggaaaaagccaaaatccttgccacgctcccttcctgtgacctttctggatgcctttccgactactgccccttcttcagcccactccaaccacttggcctctttactgtattttatatgtcacaggcacactcatggcctttgattttgttcttctttgtgcctggaatgctcttatcccaaattttcacatcgtttattttctcatctactccatgtctttgcttataatgtcacctcagtaggaccttccctttcagtcctatttaaaattataaatgccccccccatccctacataggagctttccattttcttccattgcttaacttttgtctgtaaaaattatcaccctttaacatgtcatatatatcaccatatatatcacaaataaactatatataactatacaactaactatataacttgctgtctatgcacaaaattattgaaagtattatgtaaaattaccttcagactatgtctataaggaatatataaaacaaaatgacaatttgagttcctcttttcctaattgaataccctttatttccttctcctgcctgattgccctggccagaacttccaacactatgttgaataggagtggtgagagagggcatccctgtcttgtgccagttttcaaagggaatgcttccagtttttgcccattcagtatgatattggctgtgggtttgtcacagatagctcttattattttgaaatatgtcccatcaatacctaatttattgagagtttttagcatgaagggttgttgaattttgtcaaaggccttttctgcatctattgagataatcatgtggtttttgtctttggctctgtttatatgttggattacatttattgatttgcgtatattgaaccagccttgcatcccagggatgaagcccacttgatcgtggtggataagctttttgatgtgctgctggattcggtttgccagtattttattgaggatttttgcatcaatgttcatcaaggatagtggtctaaaattctctttttttgttgtgtctctgcctggctttggtatcagaatgatgctggcctcataaaatgagttagggaggattccctctttttctattgattggaatagtttcagaaggaatggtaccagttcctccttgtacctctggtagaattcagctgtgaattcatctggtcctggactctttttggttggtaagctattgattattgccacaatttcggatcctgttattggtctattcagagattcaacttcttcctggtttagtcttgggagaatgtatgtgttgaggaatttatccatttcttctagattttctagtttatttgcatagaggtgtttgtagtattctctgatggtagtttgtatttctgtgggatcagtggtgatatcccctttatcattttttattgcgtctattagattcttctctctttttttctttattagtcttgctagtggtttatcaattttgttgatcctttcaaaaaaccagctcctggattcattaattttttgaagggattttttgtgtctctatttccttcagttctgctctgatcttagttatttcttgccttctgctagcttttgaatgtgtttgctcttgcttttctagttcttttaattgtgatgttagggtgtcaattttggatctttcctgctttctcttgtgggcatttagtgctataaatttccctctacacactgctttgaatgcgtcccagagattctggtatgttgtgtctttgttctcattggtttcaaagaacatctttatttctgccttcatttcgttatgtacccagtagtcattcaggagcaggttgttcagtttccatgcagttgagcggttttgagtgagaatcttaatcctgagttctagtttgattgcactgtggtctgagagatacctgtttgcagacgacatgattgtatatctagaaaaccccattgtctcagcccaaaatctccttaagctgataagcaacttcagcaaagtctcaggatacaaaatcaacgtacaaaaatcacaagcattcttatacaccaacaacagacaaacagagagccaaatcaggagtgaactcccattcacaattgcttcaaagagaataaaatacctaggaatccaacttacaagggatgtgaaggacctcttgaaggagaactacaaaccactgctcaaggaaataaaagaggatacaaacaaatggaagaacattccatgctcatgggtaggaagaattgatatcgtgaaaatggccatactgcccaaggtaatttacagattcaatgccatccccatcaagctaccaatgcctttcttcacagaattggaaaaaactactttaaagttcatatggaaccaaaaaagagcccgcatcgccaagtcaatcctaagccaaaagaacaaagctggaggcatcacactacctgacttcaaactatactacaaggctacagtaaccaaaacagcatggtactggtaccaaaacagagatatagatcaatggaacagaacagagccctcagaaataacgccgcatatctacaactatctgatctttgacaaacctgagaaaaacaagcaatggggaaaggattccctatttaataaatggtgctgggaaaactggctagccatatgtagaaagctgaaactggatctcttccttacaccttatacaaaaatcaattcaagatggattaaagacttaaacattagacctaaaaccataaaaaccctagaagaaaacctaggcattaccattcaggacataggcatgggcaaggacttcatgtctaaaacaccaaaagcaatggcaacgaaagccaaaattgacaaatgggatctaattaaactaaagagcttctgcacagcaaaagaaactaccatcagaatgaacaggcaacctacaaaatgggagaaaattttcgcaacctactcatctgacaaagggctaatatccagaatctacaatgaactcaaacaaatttacaagaaaaaaacaaacaaccccatcaaaaagtgggcaaaggacatgaacagacacttctcaaaagaagacatttatgcagccaaaaaacacatgaaaaaatgctcatcatcactggccatcagagaaatgcaaatcaaaaccacaatgagataccatctcacaccagttagaatggcaatcattagaaagtcaggaaaaaacaggtgctggagaggatgtggagaaataggaacacttttacactgttggtgggactgtaaactagttcaaccattgtggaagtcagtgtggcgtttcctcagggatctagaactggaaataccatttgacccagccatcccattactgggtatatacccaaatgactataaatcatgctgctataaagacacatgcacacgtatgtttattgtggcatttttcacaatagcaaagacttggaaccaacacaaatgtccaacaatgatagactggattaagaaaatgtggcacatatacaccatggaatactatgcagccataaaaaatgatgagttcatgtcctttgcagggacatggatgaaattggaaaacatcattctcagtaaactatcgcaagaacaaaaaaccaaacaccgcatattctcactcataggtgggaattgaacaatgagaacacatggacacaggaaggggaatatcacactggggactgttgtggggtagggggaggggggagggatatcattgggagatatacctaatgctagatgacgagttagtgggtgcagtgcaccagcatggcacatgtatacatatgtaactaacctgcacaatgtgcacatgtaccctaaaacttaaaagtataataaaaaataaaaattaaaaaataaaaaaaaatgaatttcatagactgggtcctatccccaagatatctcattatgtatttgcaaatattcccaaattaaaaaaaaatcccaaatcccaaacacttcttgttccaaggattttggataagggatacttaacctgtatatagcaggtaatttgttaattgtcttccaactagaagaactccaagagggcagggatttttgttgtttttgttcaccgatgtttcctagtacataaaacagtgcctgacacagagaaggtgcttaataaatgttcatcagatgaatgactgaaccacttccagaccctcctttccccaattttatagaccacattcgtctcatatcattgccctgttttaaaattctcattgaatttatatgactgtaaaaggaagttcaccttgcttagttggaacaatgtgaacctcctacatgaaccttctactgacatttgaattttcttcatcaatattcttttgctccattcaaactgatctcccttgctttgctttgtgcgtgctgtacactttcccacctccatatctatatttgccaatctgaaggtccaagttttactcatatttcaatgcctaaatcaaaagccatctccttcatggagccttctctgattcctccagcaggaaaccatctgtctctgccttctctgagtcttacggttggctgactctcataacacaacacagtattgcagagagcatagctatggttaagcataaatttgcatgccttcacagtgtgaccgtgagcatgtttcttaactcttgaatctttattctcttaatgtaaaataagaatgctaatatagttaatatattcttaatataatataatataaaataatgtaatatacattcttaatataagaatgctaatagtttacttgcagtatgattatgagattatttgagataatggaaatcccttattttctcaataaatgatatctattttcagtatcatcaccatcatctcttccttgaaatacgagtatattatttcctgttacattgtaagtttcttaaaaacataataaatgtcttaatttgtctctacacacacatagatactcagtaaatatgtgttaagagaatttgagaaccaagaccatcactttgtcccctaagttaaaacaaaaatacttgctaaaaagttggcccagcacagaggccaaggcaggtacattgcttggtcccaggagttcgagaccagcctgggaaacatggcaagatccatctctacaaaatttttttagaagttagctgggtgggcatgatggtatgcatctgtagtcctagctactcaggaggtaggagaattgtgtgaacccaggacttcgcggttatagtaagctatgactgcaccactgcactcctgcctaggtgacacagtaagactctgtctcaaaaaaaaaaagatgatagcagttttgggggggacaatcatcttctaacaagtaactctattcctttatgactttgttttacttctaagacgttgttagcatagaatttgaagcttactaacattaggttttcttattttatttccttgtatataaaaaggacttgtagttaaaaaatatccacctaagcttttctaaaataagtctgagaaaacataggggacacagtcacatatacagatacattgtggaatcaatatatgtagtgaggaaaatagaagcaagtctagggtgctatgggaacacaaaggcagtatattcaatccttctgtgttgggaaaatattttctagagaagatggcagctgagctaaactactagagatgagtgaaaactagtcaaaagaaggcaagagaatgggcattctatccaggcagaaaacatgtcataataaaaggcaagaagacttgaaatccaaaatagcatgatatatgctggatttcataagcatttaggcatgatcacagcttctattccagagcaaggagtaggaaaatgcaaagttggagagaaagttgttggccaagttacagaatatcctacatgtcatgctctagagctccattttgcaggtaaaggagaaacatgaagtattttaaatgggaaagaacatggtcagatttaagttttggatagattgctctggctgcagggtggaggctagatctgaggaatacaagaataaaggcaaacaaacaaaaatgcacatcagggctattgaaaaactccaagctaaagaaatggaatgcccaagccagagaagtaggataatacaagaggcgatggagtcaaaaactgtgggcaatagaatcagcaggatttggtgattgctttatgaatgggtttggagggaggaacctgggtttctatttggatgattgtgcagacagtgatgctaatcataggacatctttgaagagaaagagcagaacacaggctgggcatgtgggagggagatgacagttcagtttcagtcacactggaacgtctgtgcttagcatcttaaccttaggggagggagagattcgagctggagataacatttgttatcattagaaaacagagtggttcaaaccatgggagtgtgtaaactaactcaaggatgaagtttacgtagagaacagaattctggtgaacacagcatttaaagcagaggaggaggagcctacagaggaagcatattaggaatgcaaagagaaagagaagagaaaaatcaaatgaaaataaatttgttgaagctaagagggtagaaaatttcaggaaagagggattgatcaatggtatcaaatgcagctgcagtgtaaagtaagatacaagcaaaaaagtgtttcttagctttggcaaaaggcattgtaaattaggtttagagtgagaaggaaaacaagacagggttaagcctgccacttggaaaagatgatgtcatgtaaacaaatgacagtgaaagaaaagcttccaacattcctgttgcttgtctatcctaacaaaattaaggatcttcaagctggaaaggtaaagcaatgtctttaagcagcaattaaggctcaagataagttagaagatgataaagacaggaccatgtagttttgcatgtaggaaatcttccaggcccagatgaattatagtctacgacacacacatgcatgcgcgcgcacacacacacacacacacacacacacacacacacacttagaagcgttaagcatcatagataggaatgtcaaaaatgctaagaggctggaagctaataaaaagaaaggggacctcagaaaacttgtcaaatatataaagtactattatatggaatagaaagagtaaatttattttgtatgacttcgaaaggcagaacctaaataaaagtgtagaaattgcagaagcacagatttccactggaaacaactttctatcatccagtcatgacatagccaccatgaaaggcagtattttcctgtcttggaagtattcaagatgaggttgatggccatctgtcaggagggatagttggactcgatttggaagggtcaatatccagtattcatgccttcacctctctttaaaagatctcattttttatatatattttttaaaaacacttttccttattgagcttagaaaatcaaatatatttgtcatcactggattctattatttctaaggtcctttctgaataggaaatgttatgtatctagattctagaaaatatagtaaatgttgatgtaacgatgagaaacccagcttagttaactaaattatttgggacctggagaggactggaacagagttggtgttgtgttagtttcatttgtcatgggaccccttgcaggagaacaagggttatggactgaattaggcagtgctccatgctggctttggactaccagcttttaaaacaaatatttagtgatgtcctcctggtgccagacccaacactaggtaaagctactgtggtaaaaacatgtaaagacagacatcaggcaaactcagaacagaagatgatggtggttattattttaaaaaactccctcttggccagttaaaatgaattagaatgatcaaaagcattagcactgagttcttgctttgtatagttcagcctacaaatcaaatactgctctctgtttattactgcaagatcataattcacaaaggaatgttcagagaggtcagtatttatgactacccgaagtgtttcatttgcaaaaattataaatggaaaatctggcacttagttagaaatgtagatcttctggtacataaatttgccccattgatttttatgtatttcttaaactgtgcactgttgatttcaatattgttttggaacagattgaccataaatatttaaataactgctgttcaacaaagttactcaaaacagtagctgtttgaagatacaactgtgatctgctgaggtcaagaaaagcaaattaaaatagaaaagattcagaataaattgttacttggaactgttttatcaaccaaaacagaagaaagttaataagatcatccttgcaatttattagtaccaaaaatatgtttggagtggaatgtatgtatacaatatccaccaccaacatgaaggtgggaggaaaggaagattttagatttcacaatgacctgaatgaaaggattgagctacaaaacctggtgaagtgagatctaatgctggccaaatagttttactttgttttttgttttgttttgtttttttttaaaaagtctatctattactttgaaagaggatatgttaaaagcacagagtgctttgcatctgggatctactaccaaaaatatagcaaggtggctcttgtcttaacaactagtctaagaaatattctcctatgtgacctgaatacctactcttttcattgtagcatgtaagagatgttaaagccatcacttaaagatgatttaaaatatttcctagagaagcctttctcagcctccgaggctagatctgattcttctgtatgagagctatgggaatacaccgctcagatctcgtttcaaggaaaacatgctgtgagggatgactgagtatagcatgggtactagatctggccattccttatcaacagaggatttctctagaaggcagtctttgctctgggcctccctattaacctggcctagatgttctcagagctgcattcaactctgatgctctttctacccaatctttcttcgtccaccctctccttataaagatgttagagttgcatcactttctatagctttccccactcagattttctctctctttttttctccatagtcattccttctaataaatcctgtgacacattcaattccctcttggtatttgatcctggagaatcaaaactgacactccattaatgtaccctcagagttccttgtaccatttatttaaagcccacatattttgtaatgatatatttatatgattatttaataaataattttcatcctatcagaccactgactttcactggggtaggaaacatgttgacttcatccctaggtctacaaaaccacctagaaattcatatgtgatttataaatatgtattgagtgaatatatgcattaaaaaatagtgatagtactatactatcataaaagatttgggggttgcattaaagaagataaacaaaaaagtggtcacaatagactttagcaagaggaggagaccaggaggggtggagaaagaaaacaaaaagtgaaaataaatcaacagtgcttgaaaagttgcttgactgtatctttctgcttatagggttttgatagagattgacagagaaggtatattcaatactgcaaggatctcagagctcagatgataagaatctggtattactatacttgttttaacttctaatgagaacagtactgatgagcccagtcaatattaatcacattcttgaagttcaggcatttatattcttaactgaaaaatgaaaacattttccacatcaaaccaagcaaattccatgaataccaagggcttaggaaagtattttagttcgagaactgtataactaaattttccaggtctattatgatattctatatgctatattgtcattaattcttatagtcactgaaaaacttgtgagcttctttgacacacagaattggtagtgtatgttaacagaagtggagttgaaacaatacttttttgacttttgtttctgatcatggtggggtaactggtaccagactagctcttccactgcaaacaactagaaaactgttgttgtacaaaatgtaggaaagacatccctatttttgaatatcaaacaatgaacaacacagaactgtaaccacctagaaaaggaaaacaaacagacttaattgctctttcagtttgaaggcctttgatgaaccctggggtaagaaaggggcacccaaggaaaacatgacagtcttacttagctgaggagacagagatgatttcaggcagtttcatgcagccataatttggaggcagatactggagaggtgagagtggagaaagagtttgagaaatctgcaatagaagtcctattgagtctttggttgaatactaagatgcacatgtgcagtgtgagactccacaggcttggcaaagagtgactatcagtgagcctaaaatactggggaggtataaattaatcaactatgagaaccaccccaaactgagagagcttccatgtgagatgttgaagggagacccaagaaaggctataccttagcagcagggctaaaatagccacagggtgatagctaatctagattcattcaagcaaaccttgcaaacaggccttaaaaggagcatgattattaatgaataaattaactgctatcagaatgaagcccaatattttttaatgggagacatctagatactcaacaacataacattaacaatattcagcatcatataaaaatttctagatatgcaaagaagctatgattaagattaaaatcagtcaatagaagcaaactctaaaaatgataaggatgatggatgatatctttagtcaaggacttaaaaaatctattaagattatgttcaatgacaacaaataaaacataaaaatattgaggggagaaatgaaatctatgaaaaaaatacctaaaggaacttccggagttaaaaaatacagtgtttgagatgaaatttactggatgagcttcaacacaactcaaacacaaaataagttaaaaaaacaataaaattgaagatggggtataaaattattcaaactaaaacattaaaaagtggctaaaagataaatgaacagaacataagtgttgtgtaggaaactatcaagtcattgaacatactgcaattggagttctagaaagagagtaaagcgtgggcagaaaaaatatttatagaaatcatagctaaaattttctggccaggcgcggtgacactctcctgtaatcccagcacttgtgggaggtcgaggtgggtggattacgaggtcaggagattgagaccatcctggtcaacataatgaagccctgtctctgctaaaataaaaaaaaaaaaattgttgggtgtggtagcatgcaccttagtcccagccattcgggaggctgaggcaggggaatcgcttgaacgtaggaagtggaggttgcaatgagccaagatcatgccactgcactccagcctggtgacagagcaaggctccatccaaaaaaaaaaatccaaatttaataagaaaataaagccatagaactaagaaattcaataaaatttgcttaggataaatacaaagaaaatttttctaaggaacatcataataaaattgctgaaaaccaattacaaagataaaaatcttaaaaataggggaaaaaagtccattacatacaggaatacacattaagaattaccattgacgtcgcatcataaacagagcaaaccataagataatgggagaatctagagtgttgaaaaaaggaaaaacaaaacccagtctagatagaaccagtgaaaatattcttatatccctcaaaaatgaaggcaacataaagaacttttcaaaaaagaaaaaaagttgagtgaattcattgtcatgcataagattttagatgtgaattcatatctaaagaatgaggaataaaggaatgacaaaaattagaaatgataaagatgtcagtaaatataaaagataattttctcatttttaatttttttaaaaaagaataacaatgaattgtattatgccatatgtacatatattatatttagacacatatgtatacatatatcatgtgtagaaataataacaatcagaaagggaaagacatgctgttgtaaggttcttacattatacgtaagtggaataatatgctgcgacaagtgtattataaatcctagagcaaccactaaaacgaaaaccaaaacaaagaggtatagcaaggaattcagtagaggagatagtatgccaaaaataattaatatgaatgaagtcagaaaaagaagaagcaaggaacaaaaagcagatggataaatagagaaaatagcaagatggtaaatttaaaaatggaatgagctcaccaattaaaaagcgtagattgacagattggataaaaatgcaagacccaactaaatactgcctaaaaatatacactttaaatataaaacataggtaaaaagtaaaaggacagaaaaagacctatgatgtaaacaataatcataagagggatatcttagtatcatataaagcagatggcaggctaagctatattgccagggccaaaatgggacaattcatactaactgataggtaattttatgtgtcagtttgagtgggttaagggatacacagatagctggtgaaacattatttctgagtgtgtctgcaagggtgtttctagaagagattagcattggaatcagtagactgagtaaagaagatgaccctcaccaatgtgggctggcatcttccaatccattgagggcccagacagaaaaaaaaaaagtagaggaaggacaaatttgctctttcctggagatgggacatccatcttttgcccccaggcatcaaaactccaggttcttgcgtcttcatctgcagaatttacaccaatgccccacaggcccctccagttctcaggtcctgcacctggggctcggagttccatcattggctcccatcattcttggcctttgggcccagactgagttacactactggctttctttattctccaaattgcagatagcatatcatgggacttctcagcctccataattgcgtgagccaattctcataataaatcccctcctctatctatctatctatctatctatctatctatctatctatctatctatcacctactggttctgtttctctggagaacgctaatacactgataaaagggtcagtacatcagaaagacattaatatattaaatgcagattggccctataaaacagcttcaaaaatgtaaataaaaaactaactgaagcaaaaggagaaatagacaaatccacaataatatttggtaatttcaacattcctctctcagtaattgatagaacaagtagaatgaatatcagtaattacgcagaagatgcaaacacattattatccaatttcacttatttgacattgaaaaacacaacacacaacacctaaaaaaatacacatttttaaaaagtatatgtggaatattcaccaagagatcatatactgggctacaaagtgaggctcagagaatttaaaagaactaaaatcacacagagaacactctctggccacaaaagattaaattagaaattaataacaaaaatagagctggaatgtcctccaacattaaaaattaaacagcacatttctaaataacccagtggctcaaaaatgtcagaagagaaattcaacaatatttcaactaagcaatgatgacaaaacagtgcatcaaaatttattacttgcagataaaggcacacttagaagaaaatttatagctttaaatgcttatgttagaaaatataagttttaaaatcaatgatctaagcttctaccaccataagaatacggaaaaagaagaactgagcaaaccaaagtgaagaaaaggaaggaaataaagataagagccagaataaaaaatggaaccacgaataggccctttgaaaaaaacaataaaattgattaacctctagttggactaatgaaggaaaaagagaaagagaaaaaaaattgacgatatcagaaatgacagaagggatctcattataggtcttacagactttaagaagaaaataagtgggtattatcaaccattttatgctaatgaattttccagttcagaggaaatagacaatttctaagatacaatttaacaaaactgatatgtaaagaatctgaaaattcctataatctactagaggaatcacatttttaataataaaaaatcatccccaaaatgtggatccaaatggttgcaataataaattccttcaaatatttaagaaagaaataccaatcttatgtaaactcgctcaaaaaatggagaagaaagaaacaatccctaacatgttataggaggcaagcattaccccaacgctaaagtcacgcgaagacattacaaataaaaaaaaaaccccgaaataggagaaaatctttataaccttaagttaagcaaagatttcttagatatgacaccaaagcatgatctataaaaaagacattaataaactgaacttcatcaaaattaaaaacttctgctatgtaaaagataccgtgaagagaatgaaaagataaaccataggccatgagaaaatatttgtaaatcacatacctgataaaaggacttggatctagaatatataaaggactctcaaaactcaattataagaaagcaaacaatccaattgaaagatgggcaaaatatttgaacagacatttcaccaaagaagacacagaggaaactaaaactggaaacagatatggtaatccatgacaaaatgttagcatttagaagtaagcaaataagaacataaaaagataccctgcttccttagtcattatggaaatataaattcaaactgcagtaaaataccactatactcttagtagaatgaataaaaataaaaagactttctctaccaaatggtagtgagaatgctgaggaactggaactttcatacattgctggtgagaatgtaaaatggcacaatcactgtagaaaacaatttgacagtttcttaaaatgttcccctatcgtatgatcaaaccattctacacctaagtacctactccagagggaaaaaggatagatctccatataaagaattgtccatgaatgttcatagcaagtttatttatataataatagccccaaactggaaacaatccaaatatccatcaacagataaagtacggtatatccatacaatgggacacttctcagcaataaaaagatcgaactattgctacacacagtaacattgatgaatctcaaaacaatgatgctgagttaaagaagccaggaaaaatacatactctatgagtttatatatataaaattctagaaaatgcaaactaatctacagtggcagaaagagggctagggaaagggatggattacaaagaggcacaagaaactttttgagggtaatagatattttcattctcttaattagtgatagtttcatgtgtatatatctctctatatatgtcaaaacttatgtacttgtgcattttattatgtacaatttactgtaggccaactatacctcaacaaatttaaaaagtcattttaaatagataactatttaaataaatatttctcaaaaatatacaaatgaccaataagcacatgaataaatgttcaatatctttagccaccagggaaacaaaaattaaaaccatgagaagatactactacacactcactagaattctcaaaaagagtggcaattgcaaatgttggccattatgtggagcaactggaactctcatacactgctggtgagagtgtaactactttggaaaatagtttggaaatttcttataatactaaatatgcactaaccacatgacccagcagttctactcctagtatttactcagaggcaatcaaagcatgtgttctcaaaaagctttctaaaacacagttcccggtagcttttttcataatagaaactggaaaccacacaaatatctatcatcaagtaaaagaataaaaaaattttggtatattcacacaatagaatactatgcagtgataaaatgaaggaactactgacatgcaataacatggatgaatcacaagaacattttgctggaataagtcagacaaaaaggaacgcatacaatacaaatccatttatatcaagttctacaaggataagccaacatataatgatcaagtcagtgtggttatacaacattgcaaatgtactaaataccactgcattgttcatctgaaaatggttaattttatgttgtatggatttcacctcaattaaaaattagtgggccgggcgcggtggttcacacctctaatcccagcactttgtgaggcagaggccggcggatcatgaggtcaggagatcgagaccatcctggccaacatggtgacacctcgtctctactaaaaatacaaaaattagctgggagtggtggcatgtgcctgcaatcccagctactttggaggctgaggcaggagaatcgcttgaaccagggagtcagaggttgcagtgagccaacatcgcgccactgcacccctccagcctggcaacaaagcgagactcggtctcaaaaaaaaaaaaaaaaatttagtgtggatggctaaggagattcactctaaatggtcactaagtaatctttttgggatgattgaaatgttctgtatcttcactgtggtgatgatcaatgggagtatatatgtgttaaaactccttgaattatactctttaaaatgggtgcattttattgcatataaattatgtcccaacaaagttcatttaaaaatacattttctcaacttcactttcaattattggtgcttaagtgtctcttttgggcgatgagagataagagaagtccgtggttggggcttccaggacatctttttaacaagaggcaactctgctgtcacggactttgtggcttttgtctgtacttcaggcagatgagacccttgaagttgactttatcaacagctttccatgctctctgactgctggttgggtttagcctataggaattcccaagaggagataagagggaaggtgggagatatttacacacacgtactattttctgcaaggtcttcagttggctttacctcttaacagaagaccttggctcctctagaaacaaagaactcaataggacttctcatttttcggattcagtaacctcttctcccttcttgatcctgcaggaccaaggctaataataatttagcccctgattactgcactatgctttttaaattgaagagtaacaggtatacagaaagggcactgaatgctgatttttttcacccattttaccaccacctagatcaagaaatagaatgaatactcaaaaaacacctttggattcctacctcagtcattccccattttatcccaaagcaaacaccatcgtaacttccgatattttgtttttgaaatgtgtataaatgaagcaatacagtatattttcattcttgtaagctgtcctttgtataaatatctcacaatttacttggtcattctattttttatggactttgagttgttttcatttagggttatcatgaacagtactgctatgaacattcttatacatgtcttttggtgaatatatgtatgtgtttctcttggatatatacttagtagaacagttggatttactgtatgggtatgtgcagttttagtggatttacccattttccaaagtggttgtaataatttatactcgcactggtagcatatgagatttttagtatcacaatatccttaacaaccattgatatttttagtccttttaattctagccattctgatcagtatgtcgtggtattccattgtggctttaatgtgcatttcctgataatagaattgattacattttcaagtacttattctcttttttgaaatgcctgtcaagtctcttgcctattgttctattgagctgtcagagtctttcttatttgtagttccttataatctgatgttaagtctgttggtagtcacctgctttgctaacctatttttctacactgtgtcttgcctttttagtcttttaactcctttttttgatgaatagaaaaatttaactttaatgtagtctaatttatcaatatttccttctatgattattatcaccttttatgtcattttaaacgttttaacctacctaaggttgtcaatattttatcttatgttatagtctagaaagtttagtgttttattttacacattttaaacatttcatctgaaattgctttatgtgcctgtggtagggaccaagattatttctccccaaataatttcaaattttctccacaccatttattgaaaagaccacattttctccattgctctgcaatgccatcttttcaaaagattggcaatccatataaatgtgtttctggactttattatattccattgatttgtttgtttgtcctgtatccaatacccaatatcttaattattgatgctttataagatatcttaatagatggtgttctagactgaactgtgcccccctgcaaatttatatattaaaaccctaacctcccaatgtgacaatatttggataaagggtctttaaggaggtaaataaggttaaataaggttataaaagtgaggtcctgatgcaataggactggtatacttataagaaaaggaaaagacaccaagagtgggcacgcataaaggaaaggccatgtgaggtcagagcaagaaggaagctgtctgcaagccaagaagagaggcttcaccagaaacccatcccgccagcaccttaatctagcctctggaactttaagaaaatcaatctctattgttgaagctacccagtctctgatattctgttatggcagccccagctgactaatataagtggaaaattcctctactattcttccaattgtgttggctggctttttgtgctttacatttctatataaattaagaattagcttttcagtttccacaaaaacaatcctgaaatttttattagaattgcatgttgctgtatatcacctaggaaagaataaacaactttacaatattgagtctttccatctgtgaacatgatatattcctccagtcacttgtcttccttactttctgctaataaagttttttggtattgatgttttgaccctctgtacttagatttattcctaagtagttgatgttatgttgctcttataaatgatataaccccccaaatcattttaaatgttttttattatcatgtgaagatataagttcattttacatgttaattaggtatctaaacaccttgcaaaatcacctgttgattctaatagtttgcctataagtactttcatattttctatgaaaatatcccattaaaaagttcccttctacatgaagcttgctgagagattttttttcatgcttattgataatataatttttaaaaattcagttctagaactagcctttagctttttagtccatttacaattaatgtaactaccataggtttatttgttttattttgggctaggaatgtatttttaacttctgaaatttccctctattagcttgtaactgatgaattattttaccatttaaaaaatattgattgcaccagaaattgcaacatacatctattaattattaaagtctaatttatattagctatcttactacttccccgaaagtctaagagagcttaataactttaactcccttaatcccttccttctgttatttgtgttatttttgtcccctgttttaaactttacatgacgttattatttctgttcatttttctatcaacatacaacacttttcattatggttcactcacttctgtattttaaatgcatgtctctccttgcaataaattatctcatattttactcgtttaaaaacatctttatggccgtgcgcggtggctcacgcctgtaatcccagcactttgagaggccaaggcgggcggatcacgaggtcaggagatcgagaccatcctgactaacacggtaaaaccccgtctctactaaaaaatgcaaaaaattagctgggcatggtggcgggcccctgtagtcccagccactcgggaggctgaggcaggagaatggcgtgaacccgggaggcggagcttgcagtgagctgagatcacgccatggcactccagcctgggcaacagcgagactccacctcaaaaaaaaaaaatctttattttgcttttatcttaagggttattttattagatagagcattcaagagtggcagttggctcctttcagcattttaaagctgtgactattgtctttggggttccataatttcatttaaaattcagctgtccaactgtttttgttttcatagtagtatgtgtttctctctatttttaagattttggttttctttttagcagttctactatgatgtgtctaggcattgcttttttttttaatttatcttgactggagttaataacagttcttaaatctgtagttcaatggttttcataaattttagaaaaatctcagctggtatctcctcaaatattgatattgctcattacctctctgtcatacttcttagacctcaataaaaaatatgttactatgtcccttgtatctttaggcttttttcttattttctatcctttatacttaggcacatagaccaatggaaaagaataaagaaccagaaataaactcaaatacttacagtcaactgatcttccacaaagcaaacaaaaacataaagtggggaaaggacactcttttccacaaatggtgctgggataattgcctagccacatgtaggataatgaaactggattctcaactctcaccttattcaaaaatcgactcaagatggattaacaagctaaactgaagacctgaaactataaaaattctagaagataacattggaaagaaccctctagacattggcttaggcaaggatttaatgaccaagaactcaaagcaaatgcaataaaaacaaagataaatagctgggacctaattaaactaaagagctttttgtacagcaaaaggaacagtcagcagagtaaacagacaacctatagactgggagaaaatcttcacaatctatacatctgacaaaggactaatatccagaatctacaacgaactcaaacaaatcagtaagaaaaaaacaaacaatcccatcaaaaagtgggctaaggacatgaatagacaattctcaaaagaagatacacaaatggccaacaaatatatgaaaaaatgctcaacatcactaatgatcagagaaatgcaaatcaagaccgcaatgtgataccaccttactcctgtaagaatggcactggaacagaggtgtgtctatctcgtttggttacatgaataagttctttagtggtgatttgtgagattttggttcacctatcacccaagcagtacactctgcaccatatttatagtattttagctctcacccccctctccctctttcccccgagtccccaaagtccactgtatcattcttatgcctttgcatcctcatagcttagctctcacatatcagtgaaaacacagatgtttggtgttccattcttgagttacttcacttagaatatagtctccattctcatccagatcactgcaaatgctgttaattcattcttatttatggctgtgtagtattccatcttatgtatatataccacagtttctttatccacttgtttattgatgggcatttggattggttccacaattttgctattgtaaattgtgctgctataaacgtgcgtgtgcaagtatctttttcgaataatgacttcttttcctctgggtagatacccagttgtgggatttctggatcaaatggtagttctacttttagttctttaaagaatttccaaactctccttattgttttccatagtggctgtactagtttacattcccaccagcagtgtagaagtgttccctgttcactgcatccacgccaacatctactgttttctgattttttgaaaattatgagaccatgctatagtgacaaatgaaaaccttaggttaataaaataaatattaaatactcaaattaagaatgcaatcagtggacctaaaagctgctgtactataacagtagagaagattactgaccaggaagtcaggccaataaatgtttggtcctgggcctccttctattttcaatttctactttttctcttaataaccacccatgtgcatggctttaactaccatctatacctctcattctgttctcttcccaaaactcatggcctatttgatgtcactccatggagggatgatacacaactcaaagttaatcttactaacttctcccattagaacataagttgcattggaacagaggtgtgtctatcttgcttgctactgtatgaccagtactcataacttagtctagaacatagtaacagatatgaatgactatttgtggaatgaacccgagaagatactcatagctagattgtacttctttttgcttagatgacttctgactggaatggggttgggaaggttttagggggtttgggatggagacagatggtgggttgggaggtaatgattcatcctcattctttgctatctataagcctacatagcaagtcaagccttcatcacagggatgccactcatatttccctcattgacaccatacttaaacttatccaatttactagcaatcctatcaactctgcctccaaaataattgatccaatatctattcatttctttacatcttctctgctgttgcattaatccaagcctctgtcctttcttgtccactgtgatagcctcttattggtattcttgcctcctactcttatttccctatcatttatctccacacagcaaccaaataccttaaaaataacaaaaaaaattaagtccttgacctactttaaactgcaaaggtttcctattacactgaaaataaagctaagtttcttactatggtgtttaaggccatatatggcctagcgcctaccttccatactgactctggcttcatcattcttccccttgcaaactaagctctagccacactgctctgctttcttttatgctaacatagtaagctcattattgcttaaggtcccttttacttgcttttccctctgtctagaagatcctctcccctggtttttgtatggctgatgacctcatgtccttcaaatctttagcttcctggaccaccatatttaatggccactcaatctttcattatcacactatcctgtattatcttcttcacattttttatagctaactcaagttattttctagaatatttttccttttattgtctgttttattcattaccattttcccagcatctaaaataatagtgacccataataaaataatgacccatagtaggtccttattacttatctgtggaatatcgcagtgaatgacaatgaaaggaatatactctcaagctctcatgccactgctcttctaaatgtcatttctttggaatgagtccatgtttattttttctttacttaaagggaaataagtaaagtttaaaatccgtaattttttccctataccctgtctcttcttatagaactattacatatttcttgtaataataatgattgtatatgttcaattgatcttttattcctgtcaatgtgctagattatctcatttatttattacatcaaccctctaaattagatcctattataaagtgtactttatagataagatgtatgagttttggaatgtttccattagtttctcaagaccacaaagctaaccagtatttcattttactttctcaagtgaactttaggaaccaggtaatgataagatagactttggataactgatgactgaaacttttttaaaacaacccttttggtaatcagtgatggtggtagaaggagggaggtgtggggtggggggaggaagaggaagggagagagaacacttcatatcatgacagccagataaaactttggtagcaatctctgaactcagctcatttaacatcattcccagaaggaaggtgcattagttcgttctcacacagctattgtataaataactgcctgagactgggtaaattataaagaaaagtttaattgactcacagttctgcatggctggggaggtctcaggaaacttacaatcatggcagaaggcgaaggggaagcaaggcacatcttacatggtagcaggagagaaagagagagagtgaggggagaaggtgccacacttttcaaccattagatctcatgagaactctatcacgagaacagcaagggggaaggcctcccccatgatccaatcacctcccccgagttcccttcttcaacatgtgggggttacaatttgacatgagatttgggtggggacacacagccaaaccatatcagagggacaaaccaaagtcaggtcattctctctgaattcctttgtcttctgttagaacaacccactaataagtagactctcaaggctttgggttcaggaaaatcagaaagactgactttgcttgaccatttaatcttggggcttagcttgacatatttattctgttatccaagaaacaaaattacatgcaaagtagaaagtcatttacatctgccaaggagtttagtttgaaataggagagaatggaaagagaaaaatagttaagaaaaatcttaggaagataaacaacctcaaagaccaagagtctgtcttaatataactgcaaatgttttaatgaaaactgaagggaaaaaaaaacagtttggatgtctagataattgattaaaattttaattttctacctggttgtttggtactataaaaatataatcatgctaaatcacttcacaaagtgttgtaataaatgttgctttttctcaatggattttcttagaattttagtgttctgtattactattttgtgtataaagtacagtgattattttttaaaatttccaacttttattttaagttcagggatacatgtgcaggatgtgcaggtttgttacataggtaaacgtgtaccatggtggtttgctgcacacatcatcccatcacccaggaactaagcccagaatccattagctattttcttcctgatgctctccatcctcccaccctccaccttccaacagaccccagtgtgtgttgttcccccaatgtgtcattgtgttctcatcattgagctcccacttataagacataacatgcagtatttggttttctgttcctgtgctagtttgccaaggataatggcctccagctccatccatgtccctgaaaaggacatgatctcattcctttttatggctgcacagtattccatggtgtctatgtaccacattttctttatccagtctatcatcgatgggcacttaggttgactccatgtctttgctattgtgaataattctgtaatgaacatatacatgcatatatctttataatagaacaatttatattcatttgggtatatacccagtaatgggattgctgagtcaaatggtagttctgcttctaagactttgaggaattgccacactgtcttccacaatggttgaactagtttaccttcccaccaatagggtaaaagcattccttgttctccacaacctcaccagaatctcttgtatttttgactttttaataatagccattctgactgtgagatggtatttcattgtggttttgattaaatgcaattattttacgcatttggaggattaaccctgcccttaaaatccattgacccatagcattagaaagactttttgtgaaatttagtaatggcttaatttgtgtctagattagccagtgatggttgcaatggagaggaagtatgaaaaagaaaatcaacaaattctattaagctattgaaatgtgtcagaaattttgctaacccctccatgaattagctcatttaattccacgttaatcctatacagtcttattatgactcaagtttttagatgagcaaactgtatgccagagaggtgaagtaactttgcccacgttagcatacagtagagcacagggaacccaggcagtctaacgagagtttaaccactccagcatacagctcttgaaggaaactacagtagcttcagggaaaaaaaattatttttgcctaagatagttaaatcacagcaacaggggctgtggaaccaattgtctgaaagagtctataccacaggcttatttaggtaaccagtattcaaatcagaaagggctaaagacagagtgacttctggcattatgatgcaagaaaaacatagctacatgtgagtaaattgttaggcaaaaaaaagtaggatgggaacttatccttgaatctctgagacagacaaaggggtgtgtgtgtgtgtgtatgtacatatatgtatatgtatatataggtatgtaattataaatatatatatgtatcaatatatacataaatacatttatgtattcaggttatttgtttcctaacattcatttttgtgctaacattcattttgagaattttacattggggtgtatgtgtgtgtaaaagtatgtgttgagtgagcaagaaacttttgtgtatcatgggatatgtatctacgccatctgtagaatggcacagaatagtactgaaaaccaccaataccctaagagtggtgtgaggagggatgagtcagactgggagcagcatttcctaactgcccactcacaggcacattgccagaaggctttatttattctctaggttctagtcttcagattcataagaacagataatattaatttttataagaattagagtgattaactacaagactgtactctccagggactctgttttatttacccttgtttaccagcatctaatattctgcctggcataaagtcaagacctaataaatgtttgttgagggaatgagtaataaagttatataatgttttgtatttattagatcagttcctgttggcgaatcattgccctcctgggtcacggagaagctggcactcagattgtgttatgggatacttttagaaccaaggttctttgacccattagcaaacccacttcctggtatagtttttaggggtttatagagacataaattcagtaaacaagaagttattgagctctattatttgaacactatcagagggaactggggatggctcattgaacaagcaggccaaatccttgttctcatagagcttacattcttataagttaagcaacaaaataagtaaatgcgtaacatgaatgggtgataaaagctatgaaaaatcagggaaaggagaacgagtttgatggaggaatactatatagtgtcccctggggattgaattctccagggcctagaatcaatttaatgagaattttaagtgacattattaaattactttaaacacttcctttattaaattacattgataatttttcaaagatttcaactgcacccaaattataaagttcttgggaaactattttctactttatgtttagaattctgttcaatgagtggctggtgcgataaaaggatggcaacaatgatcaagaaaataaacttctagaggaaacaaggaacgaattataatagccaacatattttggatactttccctatgctggtcaaaactttatgttcattatcccagtttatcatcaaatgatttctgtgcaataggattattattatcttctttttatggcaaacaaggcacagtaagattctgtaagttgctcaacgtcacttagctagtaggtagaaaaatccaggattgaacccaggtggtctgatctagggccaaattatccccttgtaggattaagtaaactgcctccagaatccaagttttctaactgctaagatacactgcttctttaaaaagtataatgaagtaggagggcttaagtatttgagattattgattttttttaaacacaactgcaacccccaccatgaaaagatacagtattccacaaagacctttctattccttgaatactacattgaatttattccagcctttgtccagtcctctgtgcttgcaggtccctctgcctggaatgctccccactgggctcttcgcattgctgaccctttcccatcagtcaagcctcagctcaaatgcacctcttcagagatgccttccctgtctgcccaattcctggtagcccatcacccctcagtcactgtaatgatttaccctgtttttatgttcccagcccttatcactatgttaaaagttactgatgttccccatggctattttcccctactaatatgcaagtgccatgaggtgggtggcagtattcattgtaattggtccagagcctgatctctgcctgtacatcacagaggcttcaaaaacactgaagaaatgaatgctgtcccttgggtctgaagacccagatagatcccggggggctctacttctgtgcaggatcatgcatctgcccacattctgtgcagaattagagtacaagatgggaaaagagagatctgcaactggggcctgagaaatacttaccagtaagcacccaaattagccacaactgctcagaaacctaccacggagaccatctatgaaggctacttgcaggaggaccaatttgaaggcaacttctgcagttaagtatatgcaagttcatcatttcaattttatctgaatctgcttgttcatgtcttatttttagttcccaccttaatttggatctaatgcttgccatgattaatcaaccatttcctcccaccagaatgtaagatgagagcagagatccatctgtcctttacagtgctgtgtactcagtgtctagaagcatgctgaacacatagtaggtgctcaagtaatacttaataaagggaccaacaaatggcccaacactaaatttcctctgtagacaaaggcaagtggaagagcagaatgaaacatttattgagtcccttctaagccccaggcactgttttagatgttttacgtatcttatttcatttgttgaccctgttaagtggcaagctttgagagcctcacttataaaaagctaaaattcatggagtgaagatgcctttcttcttccatgccataaaatcaggtcttgctgggcaagtgggtttttaaatgaacattgggtatcactggaagcctcaaactctaatcagtttggtgaggtctatgctatgacctgataatgttgtttcaaataaataattattcaaataaataattttgtatgataccctagcatatctgaggatcaacagagaattgtaatgagagctttggccactgcctcacctataggatcacttccatttatcatctcagctctaatttatctgaatcaaagtttaaaacaatttccaaacagaagactagaaatactgcaaataaagtgaatttggaggaggctgttcccagcaggtacagaaagcttagcccaggtcagttagacagggacaaatgcaagctggcatagggtcatgcttgagattggactggagaaattgtaggagaaccagttcataataaatgactgtcccaaatcccccgccctgagctcaaaatactcaggcttggccctttacttagtgatgcttcaggggctcagtgtgagcaaacatgtaacatataccctggccctgaatgaccttgttaggtactccgtgtgaggaaggtagcacttacgagaacattcttgaaggtttaataacagcgaagtcttttcagctcattctgtgtgtaaatagggccaatttcaagaaaagatgagtttccttaaaaaaaaaaaaaaaactgtaaaataatagtgccattacacatacctccctcagccatttaaaaataccttgaggctggttctctcctgagggcttatcaagacacaagcctgccaagtgaaaggtagtcgattctttatagtgtatccttgaggtgttttcccctcttcacagagttactactcaggtcagcacattgttctaaggtattcccaggaatgtcagaaacagtcaaaccactttgcatgtaagtacagaggccaaaacaccactctggagtccacaggctggttcagtcctggtagtttacactaattctctgtgtggttttgggaagctcacccaagggttttgggttaaccgctctgcaagatggtgggcaggatctaaaaagggcttccatgtcacttccaactctggctgtctgactcgatgaggactgccaagggccagtgggtgccctcctctcctcacaggctgtagcagccatctagaaaatagctctgttcacaggcaagggagaaaattgacattgttcctttgcttctgagttcacctgtaagacccttccttcagcattctgcagctatgctctctccaactgagacttagagaattgggcattataaacagcaaatctaatccccttttctccaccatcattgttccctggtgctaagtccagagtttccataccctgaactagacatggaaggagggaggagactacgcaaagttcagtggtgccattttttttttaactttgtcatcctaggacaaagtttcttgaagtattacacttagagttttttccttagaaggcactggggtacttcctgaagacggtgattcttgggcttagctcaggatctactgattcagagctttaggggggctgtaagtccccagatcttcattttctttatttttattatttgctttttattcatttgtttaacccttttctaccatagcttcatggtgtctaacacctcagtgacaaagctttgttgatgacagtgtaatgcccaaccttgtttttactaacgctatttttagactctccctttcctttaatcacctagccttgcttccacctgaattgaccctcccttagctaagagagccagacagactccatcttggctctttcactggcagccccttcctcaaggatttaacttgtgcaagctgactcccagcacatccaagaatgcaattaactgataagatactgtggcgagctatatccgcagttcccaggaattcgtccgattgataacgcccaaatccccacgtctatcaccttgtaatagtcttaaagcccctgcacctggaactgtttactttcctgtaaccatttatccttttaactttttgcctactttacttctgtaaaattgttttaactagacccccccctcccctttctaaaccaaagtataaaagaaaatctagccccttcttcagggccgagagaactttgagcattagccgtctcttggctgccggctaaacaagcggactcaattcgtttccaagtgtggcgttttctataactcgctcaggtacaacaacagggtgggggattgctttgagatctcctaattaaaaatgccataggactacccagatttttggttactgagtacaaatcttcattttaagccaaatactgtagataattcttatttatggtagctaacatttggaaactactgtcctagaaaaaggtagacaaaaacttttagccttttgctgctactaaccatgatgattattcattcatccaacaaagatttatcattcactactatatgccaggtaaaataatgagcaaaaacacaaagtccctgttctcacggagccagcagtctagcaagagaaagaaatgataaacaaatacataatatgtcaagtagtaagaaaatctaggcagtgagatgaagggtgagtgatgggaggtgtgcttttcagacaaagtaggcaggaaggtttgtatgtaggatgattgtgcaaagacaaaagaagtaaggaaaagaaccatgtggctgagggaagagcattccagacggagggagccacaagtagaaaggccctggagaggggatgtacgtggtctgtttgaagaacagcaatgagtccagtgtggctggagtgaggtgagtgaagaggagttagaggagatcaggggctaataccttgtagcttgtttgcgttatttctaggctgcagaatactatacagtctggattgtggaacaatgatttgcagtgataatatattatacacctgttcttagtcttttgtccttatttatgctgtaactccctgttcctggctgaactcctgaagacaacctaaaataggtcttttgcttgagaattggggcaaagaataagaaagctttgggagggaggtgctatggactaaattgtgtccccctgcaaagtcatagtttgaagccccaacccccaatgtggctgcatttaataatagggccattaaggaggtaattatggttaaatgaggttattaggggtgggaccttaatctagcaggactggtggtgtttttgcaagaagagaaacgcagagaaaagaccacgtgaggactcagttgagaagacggtcgtcagcaagccaaggagagagaccctaggagaaaccagcctgctgggacctggatctgatactttcagcctccagaactgtgagaaaataaactactgttgtttaagccacccagactcgggcattttgatatggcagccttagcaaactaatacaggagggtaggaccaggaggtctttatttaattattcacctatttacttcctcagactttgctgcatgctcagtatgtgcaaggcactgtgctgcttctttgcatgcattattttatttaatctcacagcaatactgaagtaagctttatgaccatcaccttacagataaagaaacagaggcttacttaggggcagtcagttggccaggggacatgttggagcttttattcaaatgcaggactgtaacagtaaagcctgtgttttccctacatctcagaagcgggagaacagaggtgtggagccagcctacctgggtccaaatcccacctctcctgcttgctaactatgtgactttgggcaacttacttatctttctgggctttggtgtctgcatctgtaaaatggggacaataaatgctttcccttaactagactgtaattagcactaagtgagctaatacattaaaacattagaatagggctagccacctaaatgcttattaccaccctgaagtcacagggccctgcttgaaggaatttgaaatctttaggctgtacagagtatgaaaaccctcctcattctcatgttgagttttcatgtggaaagggcctcaggtttcttatttagtagttctaagaaatagatttcagtgcaatttaaagacttaggcatacttggcattgtccagaagtagaatggccaggtttgagagggagcaatctctctgttgctatctggtcaggaatgttgtgagggggttcagggcacctgtgaagggctggcatagatgaattcagaagtcttctcttgcatagaaattttataattctttctaatgggatgggaataggtgtgctacaagactggggcagctctgttttccttgcataatatattttctttctttcttttttgtttaaaaagtgaattgtgttgcctttagacagggcttgaactcacaaattcataacagccagtatcatgctttttttattttttaagcttctgcaggattttacatttggggttctgactcacatgcttaagcatcctgtcatctgggttgtaggacgatgaaaggattattaattaaggtagacatggcatcctaaccttggcttgtaagactgactgttggtcaactcccctgagagggctgccttgctgtttctataggaatatatgcagcagagcatatgcacaattctagatggaggctttgacacagcagctatatcttgctgaataaacatgatatgaaaacattcttagtggttctgtcctaagtctgcctttccttttcttccaaacatcatgcttttgcaagtggtctgcctggaagagcaaattcactcctatgcctggaatgtttactgctattccaaacagaacagaatgtgtttctgccactgcttattgagaataaaaaattctttgtctggatgtcaagacaataaacaggtgtccatgtttataaagcagttctattcagatacagtcacagatagacattcaggaatttgagggcatgcctagagccatttacaactctacataatgtaacagtaaggactgtttctagtgaccacttatctctgttttgtgtgtcccaccccttaaaatacattcatgtactgcataatgacattttggtcaataatcaaccacatatacgatggtgattccataagattttcaaattgtatttttactgaatcttttctatgtttagatatgtttaagtctggaaatacttaccattgtgttacaattgcccacagaattcaggactgtaacatgctgtacaggtttgtagcctaggagcaaaaggctataccatatagcctgggtatgtagtaggctctatgatctaggtttgtgtaagcacagactgtgtttccccagtgatgaaagtgcctaacatgcatttctcagaacatatttccatcattaagcgatgcatgactgagtgctaatctgctcttagctcttctaatgtattctcctcacagcagtcccaaaaatcttttcatgccgcaaatatgatatatatatatttttaaatgtacacccctcgataatttacagttgctctctgggttaagatgaaactttgtaatttatgttacagagacgtacagggtcacatcacttgatagcttcatctccactgtaccccatcttggtctctgtgctccagctacattggctttccctcagaatcttgctttcaccatgaccctctggggactgggccttgcaaatgtactctcctttgcctaaaatatcctctttctcatgcttcctagttaagtttgactcatccttcggatctcagctcaagtaacacttctttagggaagctctcctgatcttcgtgtgcataataaagcctcgttagatcttgtcctaatgtcatatcctctccactgctgcatttgtcacagtttacattaatttcttagattaatttatttgccttccataagagcaggaaccatatccatttttactacctgtgaacccatcacccagctgatatctgacacataatagagatgttctttatgtgtgtgtttgtattttttgaataaatgaataaataaatgaataattgctcttacaaggcagttgacagaatactgaatttgctcccaaaatttcccaaaaagtgacattctcgtgtatcaacaataagatccagagcaggctttcatacatatcttcgaagtcatacatttctttgcctcctgtttgctttttctactaactgtgcttttgcagacacttgtgaagataaaggccttggccctctcagcccatcttttctctcagctcaatctgccagtgaggaaacaatgactcagaaaactaatgagccagtccctctaatgatggcaatgatttcactgctggtgatttttctattagttttataaaattgagtgaaaatgaaggaattgccttggggcacaagaaccaaagacaaaaaatagatccagaaacacaaatcaaaagagcactgatcagtgtatgttacaggcaaacagtagtcaaggtgatgtaggttgaaagagtcaaagaatgaaaacaggagccggcattttcaactaaatatttcatatcactaatcctccctcactatttttacctgtaaaatgtggataataccatgcagacttaggataatcatcctcctgtgataacacagggagaatgcctggtgctcagttggtttttattaaacttgagtctgcgtcctccctctgctaagttccttatggattatactagaaactcctgcaaatgggttaccactcccagcttctgatttaatatgggaagatttaagatggggacatacttcccaaagcacatatcacttaatctgacaccaacaccaccaagtttcattatattgtcatttgactctgaggcatagcaggattagccaatttctcaagggacatcacatgtgaagaggactggaatctagatgaccctgaactgcaggcccagggttcttcctatcaccatgttgtatcaaaacacacaagcatagagagggatagggagagatttgttaaaggacacaaaattacagctggataggagggataagttccagtgttctataccactgtatgatgactatagttaacaataatgtcttagttacaaatatctgggaggagaatattaaacatttctaacacaaagagaggataagtgtttgagatgatgaatatgctaattaccctaatctggtcactgttcatggtaggtatcaaaacttcactacataccccatgaatatgtataattatttgtcaattttaaaaaaatttcttaaactccaccccccaaaatgtacacaggccaagaattgatttctgaggcctctactaatataaagagtattaataatagctaatttttattaagctcttaatttgcactgggtaatacactatatacttggtatgaatgatcacatttactcaccaaagcaattgtctgatatatgcaaaatttccccccctttttatagatgataaaattaaaggccaggaaataaaatgactttctgtgtattaggtagatgttttagccaatacctgaatataaactcttaaagcaaattcacagctaccttgaagcaaataagtgctcaacatagtttcactgaacacttaggtggatgacagtgaccttgattcttcccatggcagccacttttctgccagatatcagaagccttcaccaaaagtaacctcttttcagctgcagatctactgtcattttagagagattttctcccagagcccttcccttgtagtatatttctctatcctggccattgttgagttcttacctctgactgtacataagattcacttggggaagctagaaactgagattcctggggcccagttccaggggatttaattcaatagggctgtggtagagatagccctgtgtatttgccaaggtgattctcacgcatagccagggttaaaacctactgttagagttgtgtgcgtatgcatttttccctcctgctagactgtataccttaaagaatagatgagtgttttttatcttttaattacccatgtgctaagaacaatgcctgaaatgttgtaggcagtcttgtagggcagcaaagagcctggactctggagtcaggcagtatgggtgcataccctgatctatcacattttggctgggtggttttcaataggttactcagcctttctgtgtcttatctgctcacctgtaaaaaatgaaaatggggaaaatgaatagtacttatctcataatatttttgagagatagtaactgtgaagtacttagcacagggcctggtaagtaatgagcctacaataaatgctagctttgtaggtaagcaaaacatttaatggactatccttagttattgctgtggtgaatgcagtgggaaatatgaaagaagaatatgatgccccattcattgaatattcacaggcattatgctaggtgttttacaacactttttttcactctcataacaatactttgatatattttcattagagaaggaaatacaccagttgagtaatggaaggtcatccagcaggtaattacgagtgctgagattggaactcaggtttgtctagttttgaaacccatttcccctactttattactaagacttaatataaacattcactcatacattcgtgctttcaatccacaaatatttattatatgcttaatatgtgggagaaactgttctgcctactggagatatagaaatgtataaaacagagaaagcctttgctttcatgtcacttatattctatagtgggaaaggacaggcaaaaaacaagtaaatggatgtataacaggtcaggtaaaaataagggctgtgaaggaaaaataaatagggtaaaactagctgggggtgagaggagaggcagagagagagagaaatcgatcttgagagaaagggaatgagcatgtgtgtgtgtgtgtgtgtgtgtgagatattttacataggaaggccaggaaaggattctctggtgaagaaacatttgaatgatggatgtgataagacgcaattggattcctgatatttttaggaggtgaagcccaaaggatgtaccatagaattgtaagaatgatatgagagaaagaaggaaattgaggatggctccaatgtttttgtcgagtctctaggagaacagagttccctcttatttcctaggctggagaagaatactgcacaaacagggctttttttttaggagggaaatcaacaggtctgttttgagatctctactatgcatctgattggaaaggttggctaggaagttggatgtacaagtctgcattttaggtgagagattggagttggatatagaaattaaatcaatgatatataagcccataggagtggatgagatcacttacgagcaagtatatgttaaggagaagactgattcctgggcttcaatatttacagtttaggaagatgataaggaagcagcagggagtctgagactgcaagggagagggaaacagagagaaagagtgggttttgaggccaagacaagaaatcccttcaggaaggatggagcaatcatctgtcagtgttgctgagggctgcagtgggaagaggcctgcaaaggcatgactggactctgcaatgtggtggtcattgttgactctcacaagagcaattttggtggcatgatagaaagtgcaaatcagaggagaggtggtgacagtgagtgtggatgacactttcaaggcatttttctgaaaagaggagcaggtgatggggcagcgggtgaaggaagatacaggctcatgagatcagtgtttaaaatgagatgatttatagcatgtgtgtggactgcaaaacgtgatcctgtagagagaaaaaccttggtgctgacaaagtaggaacaagtgcaggagtgatgtgcttgagtaagagagaggggagatgacccagcttaaagtggaggcttggccttagatgaaagcagggataattcatgcattgtacataaaattcaaaaaatatgtttcagacataaagcaatatcaaacaatgtaaggtttttgtcttccttaattctcacaataactccttgagttgagcattactatttccatgttacagacaaatgccgtgtgcacttggaaaagactttaaatgtaggtgtgcatttataagatgagaatgatggatgagaaaatgagtagtcagggaaagctgtgggtggaggtgcatttgacgtgggctgtgaagagtgggttggttctaaatatgtgaaagggactgagaagagaatttcaaacacatgaaaaataagaatccataaatatgaaaaaggtacaaaatatagtagtaatgaacccattcttagcatgtaccctggaactagactgcatgggttctaatcctagcccttgcatttaacagctgtgtgaacttagactacttaacttgtctgtgactcggttttctcatggataaaatgaggataacagtgttgaccttatagaattgttagggataaacacacacacacacacacgcatccatacctacattgatatacacacggtgaaattgtgcctagcaaatagtatgcatcctatgttttacttattcttgtattattattatttataatataacaaagaattagaaaaatatgatgttatttttccctctgtgtgtgtgtgtgtagatttccagcaaacatgcttccgggtgtcactggaagatacttgctttaagatatgtcctcctcttgaaggagcattgttgatagaatatgggtcagtttgtttattcactctccccaccctcccattgagtccttcatttaagaaggatttcttgagcatctactcagagtcaagctctgcactaaaccgggatgccaagactgaagatgagtagggcagaattcctgtgcccaagtagcttctggccactcaggagacagacatgtaaatagactgtttcaatgtaatccaaaggctgttctcatactcagaaggaaatgtgcagtgtgatataaagattaagagtaccaatttcggattcagagagtttggacttgagtcttggctctaccacttcactagctgtggttctgaataggttgcgtctgagtcagtttcctcatctataacatggagacaatggcgtttaataagactgttgtgaggagtgaatgagatgggacaggcacagcccttagcacacagccagtggtccacagggttcatggtgctgaagctgcttcttatttcttctttccagtctccttgtggtttgtgtgactcataataacaacttcatttttggagttgttgaagacatcttcctagaaagacttgactcaagctgagttttcaagcatgggtagagaatagcagcatggaaatgagataaagacaatttcgggaaaggaagaagcacgtggcaagtcacagtacccttgtccctttaggaaaagaaagcgtccctactgatttcttagataacaataacaggccctccagtgcctggtgccaaattaggtccaccagaaagtaccaggcaaggttccttatacttcactgactctctcatttctgttttgcttcctttttttttttttttttttttttttttgagatggagtctcattctatcgcccaggctggagtgcagtagtgtgatctcggctcactgcaacctctgcctcccgggttcaagcaattctcctgcctcagcctcccaagtagctgggactacaggggcccaccaccacacccagcttgaatggcttctttacagctatgattggaattttgtttctccaattctgataccacttttgtagatgaatcctcccctaccaaggggaaggagttatgtgcttccttaatgaggtccacagagaaggaaagacagtccaatcctctttgcaaaaccctgattatggatctgcactatttggttgccctggcttctgtttgtatcttcttatttcaagttaaagaacattataataaaactagttccttaaagtatggttacagaaagctccccaagccacaatgatgaaaacaattttcatgcatgtaggagtgaatgcttttcagaatatttttcacatatggttttggaaatttatccatacaacagccttggtatttgtcatctttcattcaacaaaaatttactaagcacctataatgtgcctggtattgttctggttctggaggtacaacagttacatgtgggtcctgcttccagtacagcagggagacagagactaacaaaacagtcacattggtttgctcataatgacaaattagggtaagtgctttgaagtaagaaacccagttctttaaaagctgtgatcagctgagcatcaggatggcttctgagcttgagctgagagttgaaggttggaattaacaaggcaatggggcagaaggaaaagaaaagcagcccaaaagtctatggtggaagggagaattttgaggaaccaaagaaggcctgtgtgtctggggaccaggcaagatggagtatgtttgacctcaggcaggagagtcgggcggggctcagaatatgcaggccccgcttgccatggaaaccatagagaggttttaaatgtgagtgtttgtgttttagagtgtggggtggtaagataatcatatttttaaaaattattctgactgctacatggagaaccaaatctcctctaatgtatgaaaaagcaggcgtgagggctcagagtgagggaggggaagaaaaaggaaccaatagttgtgaaccacatattgttgatttaccctatatacaaatgtgttactatatataatgtgcttagataatgcctttgatacactaaatacaagtgaacgctggttattactattattattatcaccctgctatgtcattttgaatgtatttttttgcaactatcctgtggagtattgttacctatatttttaaatgaggaaactaagcctcagagaggttaaataagttctcaatatctctcatttgacatgtaacagagctaagattcaaaacctatggccttcctgcattaaaaaaaaaaaacacacgcgcacacaaaaaaagcaaacaaaacaaaacaaacaaacaaaaacaatgacaaggagaagttgggaagacaagccaagttttctaattaggatggttctatcccctaagaagcccagaaattgttgaagctcttaaattagttctagagtttctcttaaggagattgtttgggctatttgtatttatttgactttcacagagatattcacacactattcattctgcactttttcaaattaataaaatgtgaagttcacagccatattttttttctagcacagactacagggtgacacgattgccaacaatataaacacacacacacacacacacacacacaacctcagatgtatactgatcacttttttccccagacaaactttaagtaagtgtaaccagtttctggtggcaaagtgatgtgtttgaggaaaccactcattgcttaaggtaatgtgaaaaataaagcaaacttcaatatctaagaaaacacgtggggcatgggactcaaaaacagacggcacctatcatgtgtggagcattacaaagaactttattcagtggtaacagttcatctcaacatccttgttatagataaaactgggcatagagcaatcaagtgacctggcactgctttcttggtaccttggtacataacccatgtcttttccactatgtcccagagcctcctccacgatgttaatgtttggcaaatgccattttccttacccattgtctttattaggtttacaacaaatttaaatacatgcctttccaccctcccaccctgaaatctggtgatagtgggtgaagcagaaattgttttgacataagcaaaatgaggtttccattttaatgaaataaatcagtgaaatttaattttcacaaacaactttaaaagttcttgttgtagcaggtttttttctatatgatatagaatgtttcgtttaattaatacacaagacagcaactgagtagaccaagtgtttaaattttcaaagtctaagcaggcaggagaggacaggaggaccaatcagaaatacaaaagtcatctaggcagtttctctatggctttagatctttagtatttgaaaagttctcctggagattttagtccatgccattttttcattcctctcatcccctcaatatggataaggacttactaagtttttctccacgaggaagaaaagatttctcagtggaccatttccttttgccaccaataaatttttaaagggaaatgtccaactgtaaaaaaaaagtccatgagatatcaatgtctatgaaaaataccaccctcagtctcaattcaagggtgatcccaaatgtctactcccttccctgaaggtacggataaaaaattaccttatgatataatacaagcttccttcattataaacacacagcccccagtctcaggattctacctggaggatgaaaacaagagtgggttttcagaacaggctggtcgccagctcagttccaagagagtgtggctagacatgagttggagtcacaacacctcagcatcctcaacccttttcaatcaaatgccactagtaggacaatccttaagcctgaaaaatgtccagccagttgcttttcttgaaattgttctttttctaggatatgtcagatctaaaacacaggcacatcacatatagaaggtatacaaccagcttctgactatagaaatgtggaattctgcagtgcttagttgaaagggaattgccagaatgtttacaaggcacacatacacgtatgcatagcatgctaggttagaaggcagcagagaaggtccccagaaaaaaacaggaaatggggaaggtgtagaaggctcagcctaccctctctttaaagcattaacttaggacccccagaaaccacatttcatgtaagtgctgaaagtcagctgtgttcttactgctctgtaacccaagtacagactccaagtgaaccaatccaacaatcaacactccacagtgatgtactaagctaattctactttgctaattgctttcttgggcatgcaccaagttatcaaacagacagtgacaaaacagagagctcggacagatgtatgtggcagcacctactgatttttgttttcttgacactggttccaatgacttgtttgcatgttaaatgaaacaaggaaaattggcaaaatatttctgagttattttctaattagctgtgtcagctttgagattacctctgcaacattattctgttcttcagaaaacacttccctttccttgtacaagacagactgatttcagaagcagatctaagtctgttggatacaagcttttgccaggaatgacagtcacctagtagctacagaaagcagcatcagcagaacccgtgggaagtcagacaccagcccacttttcccacccacccagacactctccctctctggtctgtaccttctgtgtggcagctggaagaaaggatggtgttcggaggtctgaagatgtaaggcaggtaacgagagaagcatttcatcttccaaataaaaaataaaaatctaaataaaaaaacagtctcctgaatccataaggattctctcggccttttaagctggctacatcaccaatatgtttatgtaggttctttcccagatttgcaaagctggggtgcccgaggaataactggagatgggtcccattttgccatcagcgccaggaagcactgccttacatttctgcatgcagctcaaactcagaagcccccaagcaagccgggatatagcctcttcattggctgaagctcctctgaacaggatttgctgagtaagtcagtcctgcctgtaaacacacgctgaaatgctctgcctgaaacctctaccttttcccgtgtggtgagtttctcttttcgcaagagaaatccagcaggatatgggagtagtgaggataagtgaccatctcttatttagctgaaagatcagatgaaacaaagacagcatagtgttctgccctggagagagatggctgttaaaaggagccacccgtaatgccatggatctcaggaatattaaagtacagtgcaatgaaatgggtctctgtccttgcttaatctagatttagttctattttttaaaatactaaagcccaaacaataggaccatttatcatttaggtgaagccaaaagctggattgagtagtcggtgacagagggctaacacagatagattctgtgctccactactgcctctttcttcccctgccagccttaacagtgaagcaataacttagttctgagttattcactctccaaatagaaagccacaacgcaagaatagagactaaacccaaaggaactgacccttcatcaatctgtgaaccctgatggcattaaaaaacatggaaaaactaagttgatacaaggattacacaactttaccaaaactctcactgagatttcaaatgagagagagagagaaaaagagagacagaggcagagacagagacagatagactgatattatttaaggacatgaccaaccacaagatataagtaatttgggatggggaattggtttggttttggtccatgaaataataatgactttggaaaccttatcactggaaggcaagaaagcacagggcttcagtttggggtttataagttctgtcaaagacactattgtatataatgaagagaaagagtcaaatgtccttcatgctgcattcagaggcacaaggaaatgatttaaatgtccataaaagaaaaccaacatttccctgagaaagatttttaaaaataaaataaaagtgtgccttgaaaatctgatggaataatttttaagcctttatgggctctcttccttacaaaaatatttaactcagcattggagaaatgtgctggtctccccaggagggaaaaaacaaagtcattagagtgccaggacagaccatggtcatgtcaatccattcccccaccagtatgccacttctctggcccttggactactatggcatggtgacaaactgctggcagtgtcgggccatttagttctgcaataatcatattacctccttagacccagggacttggcaaggtagggccatcctaagtaaggtgctgtttaaacagtgcctaagtggtctggtttgtttttgtgggtaatttcaaactagtgacagaagactatatgcaggagtgtctccctaagagatacttcatatctaacctctggccagcagtgagggagtagaaggagtgtgggctttgggttcaacctgaccctgacagtttgtatcccagtgcattcacttaatggccaggtagaaatgaacaaattttaacactgcaaacctcagtttctccttctataaaatgggaagaataacaaggttttcctcatgtattcttgaaagaagtgagacaataggcatagagatctggcacattgcaggcacgtgataaactaccaatgttgctgctgttagccttctctgagcttctatgccatacaccaacctaagagtagctgaagaggagatgtgcttaagaggagtgaggctgcagttagacagccagggtttaatcctgcctttgacattgacttgctgtgtgatcttgggcaacttacttaacatattttagcctcattacaggcctaacaaggataataatagagtcttaaacgacactgttgaggatatgataggatagttcatataaagggcttagctcagtgtctagcacattgtaagtgcttcctaattttaattactattgtctataacagtagtatcagcccttaattacagcatattactttatttacttacctatcttatctaaataatgaaagtacaaactcttgagggggagatcaacgtctaattcatctttatatccctactgcctcacctagtgcctgcacaaagtagatagtaaatattaggtgagtaagtgaatcgatgaatggataaatcaatatatatgggtaaagcttctggaagatattttatactttttatgtggacgtgaaggtcctttacagcacaaatgaagtggatttgagcctatcataaagctggaatatatcattcaaacaaaggcattatggaatttatagatagacatgcttcaactttaattgtgtatttcagtcttaaataaatggtaggcacttagcgaatactttctaagtcaatagtaggcactcagtaattacttcctgagtgaaaaaaatactcactgaggatgctggccatagctatcctcaaagaactcaataaatacaaaacagaacaaacaaaatgtgtcttctccattagaagcaaaataaacaatgggactagaactcaagtcccaaataggcctctccaaaccagccaatatctcttgacctcaattgaaaatatgttttcaattgaaatctaaaatgattgatttagtgtaaggcctaggcacctatctacccacatgcagaatgggcaagaggcagagagaacaaatttgaaatttctttggacagtgaatctgctgcaggtagtttgcactgcaccatttgaactgtttcagtgtgcttcttgtctctttgattctctcagcaatcccattttatagaagagaaaacaggctgagggaatataataatttatccacaggagatctcatatttccacactggaatcacctgatgagctaatgaagaatgcagatttcacagtcctcaagccaatggatccagattccctggggataagaagtgattcttcctttaaagtttgagaacctctggagtaagatgtttaatttcatgctctggcttgacaagtttgggtaacggaaagttttccaaatacgcttgtcctaaatcatgtatccaacaatttattgccaccctgacgatatatcaggctgagtgatggcaacataggatatgagataccacccctgctctaaagaagtgcatattccagaaaaaagaaagactaatgaactgttttaataaagccacatatgggctatgacagcaggaagaggatacgaaaagattctttgggattataaagccccaaaaagtcaatgttacagatccatgcttttgcattaggcattatttataaaaaatgaaaagaaacacctcctgttaaaaggcaattatcttactgggaggcatagcaaatgaagagttagcagtcattaactctgtaagtggcattagtctcggatatacctagtgtcatcacagataagagcagggtcaccaggagaggaatggtgtcattataaggagaagggaggatctaaagcaatggcagaggtttctggagggagagctcaagagcagaaagaggtctctgaaagggaaaccagcagcctcagagaaaggaaagataaaggtgacccatttaggtgccatgtgagaaggccccttgagtgtggcagagcagagtccagtgacaagaaatttctccagatgatttccgcatgtcaggttctgacagtggcaaacaagcaattaattgggagtttcttgagtgctgtgctctgaactaggctgctctaagcttttctttagactgacctcctgggagagcagaagcaaccatttctgccctgccaagtccagctagagcccctgccttggggccaatagacttggagtctcctaactgcctgttttcactggttccagtcctgttgcctacctcactgaagcccacgtcttacagaaaagttaccctgataattctctctttgtatgtttttacaacctcttttgggggaagtttcatcctcacagtttttcattttgctatgaaagaaactaaatcccaggaaaaaaaaattagcttatttaatattaatcaggatgagcctgcccaggtttttacttttaagtcaaagcaaagcaaattcctactcattcttctaatcttaaataaagtgccatatctccagggagaggtttcttgatgcctcagactggatcaaatccccctcttacagactcccacataccatgttcctcttttaaaatactcgttcattattgagcatatttattgaatacttacttaggccaggcactgtgcatggtgccaaggaatcaatagtaaacatgacagataaaatacctactctcagccaggtgtggtggctcacccgtctaatcctagcattctgggaggctgcagtgggcagatcacttgaactcaggagtttgagaccagcctgggcaatagggtgaatacccacctctaaaaaatatacagaaaattatccaggtgtggtggtacccacccatagtccctgccacttggggggctgaagcaggaggatcacttgagcctgggaggttgaggctgccgtgatccacgttcacaccacagcactccagccttggtgacaaagtaagtgagagtctgtcttaaaaaaaagaaacaacaaaaaaacaaaacaaaacaaaaaaatgaaaacctactcctctcttcttcgggtataataaccattcccaacatatacagctcctgagctgctgtgaggatcaaatgaggtaatccaataaagtgcttagaattctttgataattgctgtttagtatctgacaccctggccagaccctaagttgcaagaaggtaaaaattggactttttttatgctgaattctgagatcaaagtttgctgcctgaagcataagaggagtttgataagtacatgctggattgaattgagctgaattgagttgaactgaataaagaaaattctgacaatttccatcacacttcctacacccactagccagtgtgtgaaattcacaacttgttaaattctgacctgaaagaaagaggatcctctttgtggttagttcatttacccattcattcatacaatataatcttttttagcagctattaaatgccaggcactcttctaggtgttgaggatacagcagtaaataatatattaaggtttagctctttgagtttatattctcaaagaaagaggtaggtaataaacaaacattacatgaacaaggttattttaggtggtgaaaagtagaatgaaggaaataaagtgggacatggattagagagtgactgctttgcttgatggtcagggaaggcttcttggaggaggtgacatttgagctgaaaatgaaagacaaattaatggccaaggaatgggtttggccctctcatttaccccactgtagcctgcaatttatcctcaccgagatttcctcttctaatttaactaactacctacagattttaaaaataatttatttaacatttgtttcactgctttaatataagctctacagggacacagggtatgttgtctttctcgctcattgcatcccttagacctagcagagcagtcaggagtgacttgattcatatttctgattggcagtctggactgatgattcagccagctctcttggcatgtgactaaagcaagagagaggtgggaagctacagataagactgaagaggactttgaagatgggggtcggctccatttagagcagctgctaccatgcagcaggggaagaaaaaaagcccagtgcctcacaacagaagattttggctctcattaaaaagaacgaaagaaggaaaagcacaataaagccaagcatgttttgcaccaaattttatatagtaactctcatagtacctagaaagagtagacaaataaaatctcttaatttataaagagaagtcagagcaggtaggcaacaggatttttgtttgtttgtttgtttgttttttggttctgagccatggaaacatgatttgattttaatagatgatgataatacagtcatgtgccataatgacatttcagtcaactgtggactgcaaatatgaaggtgttcccgtaagattataataccgtatttttcctggaccttttctatgtttagatatgtttggatacacaaatgcttatcattgtgttacaactgcccagagtactcaggaccatgacattcaggactgtacagccttgtagcctaggagcaataggctgtaccatctaggtttgtgtaagtgcactctaggatgtttgcacaatgacaaaattgcctaatattactcttctcagaatgtttccccatcatcaagtgatgcatgacggtagtagtaataagagcaaccaccaaatctatattcatctgagttcttcattcatctgaggattcattcaactgagtaggttccagttactctgctaagtgctacacctagaatatctcattgaatcctcctgaaaaacctaaaatacatatcattattttatctgtttatagatgaggaagtttacacagagacattaaataaagtcaactgcaagcaagtggaggaggtaacattccagtacaggctttccgcttattccttccctcaggctgtcccatgccaccgtgctctctgagttgcctggtctgaacattatctcccctactgtctagtacaggacacggcaccaagactgacactaagattttgtatctgcttatttggaacttgtgggtatttgattagggctgggcaaatttacttctgacctatttgaaagaaagagtttgccaatgactaccgtaatcatgtagaagaaatctagcaaaatccacacacctacctatcaatgcctccagagatccaatatgtgttgaaagtttgctattcctaggacatggtgccaaggactgtgagattagatgcatgtatgggcatagaatgtaaaagggagggagggagggagggagggagggagggagggagggaggggggaagaagggaagggggaagagaggaaggagaaaaggaaggaagagaagggaagggaagagaagagaagggaaaggaagggaagggaagggaagggagatagaaaagaaagactaaattaagtaataaatatataaatattacagaagggccaaaagagatgcatagtagaaaactctcacacctaaatggaacattgggacagaatccaagaaaacttcctggaggtggtagcatctgagataggctatgaaggagaagaagaatttgcacgtgtgaagatataagtgggaagagccttctggtaagaggttaacagtaacagttttactaaaacagctaaaattcactctttctcctatttattataagttaatggaattataaaacatattttaaatatataaagcagatttcagttgctgtatttgggctatgcacttattagctctcatttggaaatagtggactttaatatttcttgtccaagctggataaaaaatgttccaattattcagtgtatataatgcctcaaagccttcataaaaagaaagcattccaaagtaaatccagaatgtgcttcctgttctgcagaaaaaaactgtcctatctgcctccttcccagacatctctgcattttaattaaatcatgaatattatgaagaggaaccaatattctgatatgaaacaatattttaaaaggattgctgtgactctgatatctattttggccttagagccttccccaggattaggcagcatatttcttcttggacagatgagaatgttagaggatttgaaaggaacgcagcacatgaatccaggtggcaagatcttagttttctgacctgtaggctaacacttagagatacagaataggcatttgagtaagtggttttaacgtcttttcaagaaaacacttttaactcagttttcctcttgattctgagaggccataatagtaaatcttttaggaggtagcagaggagaaaatgttgtacctgttgttcttacagtaaggggccagatttgctcattcagcgaggaccttcccctgggcgtgtcacactgctcacagcagcctgcatgagagttctgtttggcctgcagagtattgtattttctaattcaaacttcatgcctttaaacagggtatgtactcatcagttcctctacatctggattacatctggagagatttacacaattaccttcccctttgctgtttcagtctatgagctttgctttatggcagggtttctcaacctcagccctattgatattttggacaaggtaattgttgtgtgcttgtgtgggggagatgggtctgtttgaggatgtttagtagtgtcactgtgctctacccaatagaggccagtagcacacttcccatcccccagtcaggacaatccaaaatgttttctgacatcagtgaatatccccgggggtgcaaaattaccctcccacaccctatattgagaatcactgctttacagcaatacggcctcagagacctgggctgtgataatggacacattaattgcatattaggcagcataacgagggtaaataatattttgattagaataaagaagaactaagatctgtgtgtaattctttataccttagtttcctcacctcattctcccacaggtctagtatacaaatcaaaacaatctagcatatgaaacaatatttgtaaatgtgttttgaaaacttaactatataaggttgttgccatttggtcttacctagctctttaggcatccactgataccagcacattgaaaaatagcagctctattccaggataaatcatttaaactataaggcattccataaaccaagtacactgacaaggagttgaacttagcagtaagaaataccagtttgggcagtagaatgaattttcttggagtatcctgtcttcttggtttttcttgctgattggaaagctagtattctttcatttacttaatcatgcatttattcaatatgtatttgctaagcattagcatacaccaggcatggtgctgggcactaggaatgcttacacaacttgtagttgtatatcagcaagtagttgtagcagacatgttagatataatcctgtcttcatgcagagtatggactagtagagaaaacatacaaggagcaagaaaattataatgcatttggtaagtgtatgatggagaacattcaggaccttctacaagggccacaaagctcagagttcagggttaagaaaggcttacttgggaaaatgaaaccaacactgagatttgaatgatgaatgggggttgccagaaaaagagagagtgaaaatatttctggcaaaggagacagtatgtgtgtagtgctggaggtgaggggatatggcattagaggacacatggagcagagagtacgtgaggagaatggtgagtgaggctgggggtatcctaagaaaatgaaacctaatgaagctttttgggaggcgagtgacatatgtacacactggagatgctactctggatacagtgtgaagaatagactggaggtggtcaagacaataaggagagggggagtaagccaaagaggctgctccaatatccagagaagagaagatggtgtccaaactaagatagtggcaatggggttggagcgaggttgagggattggagatactgacctatttagagaaaagagggaaaatgacatatgacttagtgatagagtgcatgagtatgagtgttgaaggaagttaggaaggcagagccaagaatgattcttgggtgtttgggagggctttcggaggaagaaactggagtttactacagccattgctactattgacaaaaatgaaagagtttatggggtgcctgctgggtgcgggtccgtgagctaaatgccaacaagcattatctcctttaaatcttgtaacatccctgtgagataggatgtattattctcaggacccccaggctcagaataacctgatcaaggacccacacctggtaataacaggttcctgattcgggctggaatcaaacccaacagactgactcccgagtcaggttgttaagcctgctctcttaactaccacatagaaccattattgattcccttgaatgtttactttctgggtttaaatcataggttttctggtgactaatgatagttttggaggaaccattcaatcatttaaactcttcaaatctcaatttcctctgccaaaatctaggtattggaatatctccttcagagggcccatggagtgagtaagttagtgctaacattaataatgacagagcaagcatttattgaatgctgactgtattccatgctgcattgtaaattctttacatgtattagctaatttaatcctcacaagagccctggatgtagcttcaattattatccctatgttacagatgaagaaactgaggcacagatacattaaatgccatactcatatagcagatttgctggaatgcaaacctgggtgagactttctggaacctgtgctcttcactatggtgtcatgcagcctctgctaagaagtgagaccttagaaagtgtttgacacaccaagagcctagcacctggaatgttggatgtgctcagcgctgaccataatttttcttcaattttaagtttatcaacttttcaataagtgtcaggcaccgtattagacaaataagaaagatatggcccctgtcttaatgcctttcttggactgctagaaagccatttctaatcatgatttttttttgtatcatcaagcctcccttgcccatgagaagttgggaaatgtcagcagtttctgaggaaggctttagagaagaccagggaagccaggcttcatcaagagccaaatacatggcctgaaccactctgctgatgtgattagcctgggtgttggccaaaagaccacaccaaggcccttggtgggctactgtctttcctcctttaatatttgtgcatttaatcaccacctaggttaaagaaaacagctgattgataaaatagaggtagaaaatgctaacatctgctagacggtcaggaggtttttatttttaattgagaaaaagttgtctacatttacggtgtacaacatggtgtttaaaaatatgtacacattttgaatggctaagttaattaacatacacattatcttacatacttattatttacttataagaacactaaaaatctactcagcaattttccagtatacaataccttgttattgactacagttaccatgttgtacagtacatctcttgaatttattcctcctatctgaaattttgtatcatttgtatcctcaacctcctcttaccccaacccctagtaattatcagtctactctctggttctatgtgcttgacttttttagattccacagatgtgagatcatctggtatttgcctttctgtgcctgtcttgcttcacttaacatcatgtcctctagattcatcagtgttgtcacaaatgacaggctttctttctttttccaggccaagtaatattccctttgtttttccaccagaagggatatcagagagagactctaatcccttaatgccacaggggaacctgagtggtggaaacattaagtggtaaagtggaagaggaaacttccacataacttcattctgtctgttttcctttctgtaccccactttctctgtctataagtgggcagatcttctaaaaaagatctcccagtttccttcaaaggaaattccctcaaattccaatatgctatgaatctaagtgtttaatcgcacagttacctatttgttcattaacatcatgtgggtaaataatacttggattaggtgtaagaagtcctaattaattgttcatgtttgttgatgatgtagagacaactagctgtctgtaattttcttccacttgctctgacatcgtgtctgtagaactggagcctagaaccctctacaggtgtttattgctcttcccaaagatgaaatataatctttgtgtgcacccaggtgtaaataatctttttagtaaacacatggatctgatggccattttaagctcatttagagagagtttactaaacttagcaaatattaaatattaaaaaaataatgatccgggtggtagaatgatgagtcatttttattttcttgttatctgttttcattagtatcacagctaacatttacttagcattcactctgtgtcaagcgccgtgctttgtgtcgattattttatttcatcctcctgacaagcctatgaaggagaaactactactttcccattttacagaggagtaaagtgaagctaaatcaaatcaaaataaagttatgcagtctattcaaagtgacacagaaagtcgtttcattgggattcaaacccaggccatctgttcataggtcattctcttaactatggtaaagtctttctaatgccctcaagtttctgttagaaacacaaagagtattactttatgtgaaaaaaaatgtaagtttttaaacagtaatatctgagttgtttttaaaataaagtttgttatttattttttctgttttagtttcatgaatttggtttaaactgctattaaatagcaatatttttaaaagacatctttggcatgctgtaagatactttttagaaaaatattctctcaggtacacctgatgagaagctgcgctttacatgaatcattgactgaagaaagaaaaggaatatacattctgaaccatgtgtgaataataagctgtaaaaaattgccatcagttttccttggaaaataggcacttaatatcaatatttggaaatcattactgcttgaatatcattggtatagacctgccaacataaaattacctggtatatttgattaatggtgtagagtgagaagcacacatggacaaacgactgtgccataattttgggaaaggttgctttaaatcgtaatcagaaaaatcactcatgaaacaatagatgataatgacccttaagaaacagctaatacaattatggaaatatcacccacagtaaaaaataaaatgaaaaaacaacagatcttatgttcctttaactataagctgaaaggacatggtcaggtctaaaggctgccaaatttaagtgatctcaacaatgccttgaaaattgcttttgggcgctgaacaaaactgtaacatttacaaattccagtggtgatcctgggcaaagatagcacagtgaacttcagaccacagacagcattttactatgagaggtgaggtatgaagagctctacgtcagaagcgaaaacaaaacaaaaagagttgagtttagaggtgaggtttaattttcacaatacaagtataaggaagattacgttactgaaaattctccactgaggtgaaatgccctaggatttaggtcctaaaacatcagagtacttccatccttagactcctgaaagcttcccattgtacccagaataaaacacaattatttaccatggcttgcaagctcacacctgaacctgcctctgcttccctccacaacttcaacataaactcttcccttactgaccaatccaggcatcctggccttccttctggccatgcctggattgcttctgtccagggccttcacacttgttgtctcctgtgtctaaacactgttcccatggattttttgaacatggtttctactcattatttgggtcttagcttaaatgtcacctcttcagaaaagcctcacagaaaagccatctaataatgtagcattccccattccctcatttagccactcccacatgaacacattttatactgtttttttttttttttttttttttgagatggagtcttgctctgcctcccaggctggagtacagtgacacaatcttggctcactgcaacctccgcctaccaggttcaagcaattctcttgcctcagcctcctgagtagctgggattacagacgcctgccaccatacctggctaatttttgtatttttagtagagacagagtttcaccatgttagtcaggctggtctcaaactcctgacctcgtgatctgcctgcctcggcctcccaaagtgctgggattacaggtgtgagccaccacaccaggcccattttatattctttatagcatatgtcatcatcagaaaatgtcttgtgtttttgtaagcttgcattttccattgtccacctctgcactagaatgtgagctccattaataccacagaccgtggctattttgagggcttctgtgttttcaacacctactgcccatatatatttactgaataaatggatgaataaaattcaatattcttacctgcaaccaaattggtataaagttatttatacactcttttttaaagctctatataatagactaaaaataaatatactaagaaaaaggcgtaatccttacttgaaaccttgagcaaaaaaccaggaaccaccccacaatgtccacgtgcttaattatttattattggcttttaaattccattaactaatagcataggcagtaagtaggatgatgctgagcctgcttaatgagcaacatttacaaaaaggcaaatgctcttctcacacaccctgggccccagcttcaagacaaatccgtctagagaagcttggtgtctggatttgcctgagccaaatgttttaccaagaacaaggccaatgacccaccacccttggcacagtggtagcaatagaactggttaagccttatctgtcttttttttcctgtagctgatactattgtcggactaccttgaatcacatcctcattccttgctgcaaagccgagattttgttgtggcatcctccactcaggcatgatgatcctataccaaactcagatgcaagcccatttgtataaagctagttaggctaatcccattctccttgccaatggatggtttagaagtgggcatctgctgtgaagtggagattgcagtggtccgagattatgccactgcactccagcctggcgacagagcgagactccgtcttgaaaaaaataaaatgaagtgggcatctgacttagactgtggcaaaggggacatcaaaagaaattttctagggatatctgatggaaaagtttcctttatttaaaaaaaaaaaatcagaatgtcctttcgcttgacattgttggtttatgtgagtatgacgcccagaattgtagcagttgtcttgggaccaagctgacattccaaggacagcaaggcagggagatggagaggatctgagtcctctatgctgtgcttcacctagggaatttatcagctctgggggctccctgcctcatgacttattatgtgaaaaactggattattgcaataacctttcaaccgattcctgcttctgacagtggtcccttaattgagctgctgctagaaagagcgtttttcaactagtggctctctatttcattcaggcaggagtccagctatttataatggtttataaggtccccatcttgcatctgtctgccatcatctgtctccatctttcacaacttcctcctttgcctactcaacttcagacacactggccacaagtccagtccttaaacataccagataagcccttgcctcagggcaattgtactggctgttccctctatctggaactctcctccccagatattcacaagacgatattttttttttgccttcttcaaatcgttgctcaaatgtcatcttttgcatgaagtcttgaccatcctatttaaaagagaacaccatatccctgaaccccatattggtttattttcttacattgatagcctcatattttatattccacttgtttattacgtctattgtctagcccctccactattgaatctccagtgcctagaatgccaagcacatagtaggtgctcagtagatatttgcagaagagatcattcttttactgttccagatattttgatagcagttttctgttggagctgaaagcatcttgaaagcatgatggatttcccttgagttgccttggtgtcctatgccctgcattttcaagacagtcaaccatgtcttaaactcacagtcagtgcatccaggggaagatgagcagtaaaaaaatttctggtgtaggattcaaaactttgctttctggtctctataagacattggacaatttaaaacttatctctagctgccttaatctcctcatatctatgaagaaaattaggtctactatctataatatctaaactaactttttgtctgcaatgtgggattataagactgattctagttatgtcctatgggttataagatgtatatgacccatatatgttaaaagtagaaaagtcctgtgtatctgtaatgaattgttttgaatgaacatttttattctctaaaaatatccattattgttgtattagtggtagtattgatgttttttggttagttgacatttattagttactgaaggctattttcagtcaataaatatttattaagcccctgcttggtgtcaggttactttccaagattactcaatcacagtagctgagaataacaactctgaggtcagactggtgtgtaaatggatatgttgttaaactttctgagtctcaatttcctccaccgtaaaatgggcttaagctggcacctgcctcatatcttagtgttgcagcaaaggtggaatgagataacgtgttgaaagcagttattaaggagtctgatctcgtaaaacctgattaaatggaattatcattattattactctaccctgaccaggtattgtgcagcactttcaaagatcttattaacatatcctttcatcctcccaagctggcaatcacccagggaacctgagcaaatagcacaagagaataattgaaccatgaataaaatgtgggtctgtgtacccagaagtcctagctaattcctgtttctactttaggtctcatattggcttccaatctagccagtcttactctagcaagccttccctgctctgttcctagtgtgggttgggtgacttactctttttctagcactttccacaatcacactggattgtcattaaaaaccatgtggtgatgtcctcaggaaagtgtacagtgcttaatggaggggagcaacagggttttgtccatgactggcctcatcgtccagcccagtgcctggcacatactaggtgctccataaatatttgttaattaaacacatttaaagtgattggcattagggaaagggtgaaataaatagccatggagtttttttctccttcttggctaggaaatatttaattacctaatgcttacaaagagaacaggatgtttgccttcaatgttatgcaaagaacccgcttcccttcctccagagctcacttctcaccaactcacctgcagagtacagcaagcctcctcatatcaagacattctccatcacagctgagaaaaaatgctttcatcttgcacaacttgttcataatcactccaatttttcttctggcagattggagcgccatgcaaagtgaagttgcataggaaatccccctgtagcctactaggtgcagagaagagatctccacttctttttcacacacagagggaaggttttcactcccttcagtgcccgaggcagagaacttggctgcacagtatctcacatttattggcattctggtttcctttaaatgcactcaaaacaccttcagattttctatcttctctgctcttagaattgccctctgatgtaaggaaagaaagaatagaatttctcaatgtgtctcttggatcaaactattagaattatttgggatgggcggggcgtggtggctcccgcctgtaatagcactttgggaggccgaggcaggcagatcacaaggtcaagagtttgagaccagctgggccaatatggtgaaaccccatctttactaaaaatacaaaaagtagccaggggtggtggcaggcacctgtaatcccagctacttaggaggctgaggcaggagaactgcttgaacctgggagatggaggttgcagtgagccaagatcgcgccactgcactccagcctgggcgacatagtgaggctctgtctcaaaaaaaaaaaaaaagaattatttggaatgcttgtgaaatacacaggtcctttgactccatcccagacctagtgaatcagaatctctagaggtagaatctagtaatatacattttaacaccattcccaggggattcatatgcacaataaggttggaaaattattcagtatcctgcctaaggtcactaagtgggtaactgaaccaagtttaaagtgagagattatctgattacaaattggtgcctaattaaaaatcctcttgagttgttgatttagaaagcttctgtccaaaaagacaggattccttctgcctgaaatgggaattcttttcattgccagcccttcaccctgtattcaggagcgggaagagcaaggcaagtagggctccattttctatcatttaggctaagatctgtggggtgaagttataattattgtaactaaacatctaaacatctaagaaagcgtatttgtcaatcactgacatctttctataaaatgaggtgaaggctacaagtctttttactgctttgagacaacccagttggtttttatttatttattttttttctggtgacagcaaagagtcacaatcactgaagggaagctgaaaaatcattcttataatctcgaatttcttaaacatccatgcaaaaggaaacattactgcaaatgttatagttagaggattcctctttgcaaggaagtcacagttgttggcttttactttagggtatatgaaatacacctcacatcgacagtcaaattgatgtttttctctcattagaaagcagaatcgatagagtacctcatccttccctctacatgagtgatcttttcagagggagggaaggaaaaaatgtgatgcccatgtagcaaaacagaataaatgccacaattatttcccatgaataagatgaagtgacctatgttgacagacatcaaagaactgcagagtgaggaacaaacaaagcaccctagaattgcagtatcagaaagaaaatggttatatgctgtagctgggataaaaacagaaactgcaccagataattctttttcccttgtacaaaatcagacaccaagtctcaagaagttatctgatatcgagtgggaaatttttaccatataaagtacttctaatgaggaaataatgtaaaatttcatgcaatgaaatcatatgttatatgaaatatgcctgctaagcaaatcaaatacaagcattgcacacggtaaatcagaacttttaaatgtgtaagtgtcttgcaataactcaactaagtcaagaatgtttagatggcatcctaaccaccagcataacagtgtaagtttaggtcatcaacaaattgtttgttgactgcatgtccacatgatctgcataagttatgtgatctcattcagttcattggtgccaaataccatctgcatgctgaggcctcctcaggttctatctctatctctgagattgtctctctaagacatatatatgactcatatatatacatacaacttccttcttgatgtttatacctttgtacctcatagctacttcctattaattgtgttcaaaatgaagctcatgatttttctccccaaatatctttctttttcaggtttcccagtgttagtaacggtgtccaccaaccacccaattgttcaaagctaaaacctgaaaactatcttaattccttagtttacttctcccctaaaatctagcctattgcctccaaaacatgcctggagcctgttatctcttcatctgcaccttctccactctaataaagccacattgtctctcatcagacttcctataaagcccaaggaatactatttttgagaatgtgtcccagggatataatcacagtagctaatcatgattagtgaataatgtctatgtgttatgttgtttaaaatatatttctaattatattatcataagaattcttcaatagctttattatcccaattttacatatcaggaaatagaatcatgaaaaatttgaggtaacttactccattcccataagtagtgaagctaaatttgaaccaggtatttttaactgtgcaacatatgctcttaatcactatatcacactgcgtttcctggataaatgtaaagattttactattaggtgttcataacaatgttataaatattgaaaatctaggtaaataaactagggtatatgtacctcttattgtatgaaagatgatcctatatattgttaagtaaaaacatcaatttacaaaatagtatttccattatgactccattttggtaaaaaaaaaattgatattgtctggtgtaaactaaccaattccttgcacagtatttgacacacagtacttgtttcttgagtgaatcaattaatgatcatatatgcataatcaagaggttagaaaaatataaacttttaacagtgctgatctgtgggttgtaggtttatgaatgacatttattttctgatttttattggttaaatttaaacttttctacactgagaatatattgtttaagtaatcagaaaaataaaagaataaacattatgtttttaaaaattatttaaggtttgtcttaaaatggtttcttcccacaagtctattttgctccaccaaattttgtgtgatattcctacctctttggtagtctgagcattgtagtctttagcctaagcacttttatctgtagctcattttaccttgtgttctatttgatgtgatgctttactcttctgggccatgctctgtctcctcttcagtggtgcatttcttgagagcttggactatatttgatttatctttacaaccctctcactttctgagacagtaccctggatatagtaagcactcactaaatgcttattgttgaactcacagtatcattcatttaaagtcctatagaataatttgacatgtgaagaaattctagtctgctacttgatacccaagatgcacataagtatcttgcaccaagatgcaatttgaacatcttataacaatctattggtaatggcctgatatatatatacaatacatatatattacatacatatgtattatatatgtataatatataatatgtaatattgtatattgtatatgtattatatgtataatattgtatattgtatattattatatatgtataatattgtatattatatattatatatgtacaatatacacatatgtatgcataaatataatatatacatatacgttatacatatatgtatgtgtgtatacacacacacacacacacacacacacacacacacacccacacccacacccctagcccttatagccataatgggtaactatacgattatccccattccacacctgaggaaaactgaagcatggagacattaacttgccaaggtaactggctagtaagtgatagaactgaaatagaaaaagccattaataggaataagtaacatggaagggaaagctgaataatttttattgactttgagcgtatagaaaattagggtagattatgccaattaaaccccttcactttcctttcaaccagatttttaactagtagcaagtgaaagtcatttattaattcactcaacaaatactcaacttccattgaggcagtgctagtggaggttaaatgacatctaagatatgttggccagggaacctccatgccagtggctgtgtgtttgtgaccaacctaattcttctttttaaaaagtttctgcctgtattcactattttaaagtgcactttccaaacaaaatagggattgtcattttgatcctgactctgacccaattgacagtcagttcaagcaggctacttttgtattatgcaacacaaacatttcaacctatcttcagttcacgtgtattcataatgatcgtctaagggcatatgtgtaaaatgcacattccaggccctcattctagactactaagtcagagtctctattttcaaaacaatgtttaaagagcaggggctttggagtcccaaagactgggtttgaaaactgtctcacccatttataagctatagtgcctttggcaatgtacttaatattttttgtttgtttgcttgacttcaatatcctcataagtaatgtaggaataaaaattcttacctgtcataaggttttggtgaacactaatttagaatgagggtctaattataatatttatattaatagcttacaaatatcgagtacttacaaagtattgagcactgacgccaatgctgtatctgtattatcttattaatttgtcttaagcaaataataaacctgcaactggtaagacctatagttagagcagacactagaattctcataattgatgggaagccagtcacaacgacaagatttaagtgcagagtaagagaataatggattacttggaacaagtcatctagacttgtggtgcccaaagccagtccacaacatcagaattaactgggtaaactcattaaaacacattgtattggccaggcgcggtggctcacgcctgtaatcccagcactttgggaggccaaggcaggcggatcacgaggtcaggagttcgagaccatcctggctaacacggtgaaaccccatctctactaaaaatacaaaaagaaataaaaattaaaaaaaaataagctgggcatatttggtgggtgcctgtagtctcagctacttgggaggctgaggcaggagaatggcgtgaacccaggaggcagagcttgcagtgagccgagatcatgccactgcactccagcctgggtggcagagcgagactccgtctcaaaaaaaaaaaaaaaaaaaattgtatcaccctgacccttgaaactctaacttagtagctcttggagacctcagagtctctattgtttaaaaagttcaaatgattttgaatcatggccaagatttaaaacaaggcattcacttgagcttcattttcttaagatccataaggttagagagtaggtcatttttttctttcttttttaaaaaagtttctaatgtctagcacagtgctgtcatgtagaagacactcaaaaatcttcttttaggtgacataaaatgggattgataattttctatctgtcttcataggggctttagaaggatcttttgtaaggctctatttgacaattcatctcaaaaatagatgagtttatatacaaatataattttagattcagtaatcccactactgattctatatttaaataataaaatcagtacatagaagagaaatctgctctcccatgtttattgcagctctagtcacaataggcaaattatgaactcaacctaagtgttcataaacagatgaatagatacatacagtgatatatatatatatataatatgtgatataaaatgggatatataatatatataatatacacacaaacacacacacattttatatatatacatatatatatatatatatatatatacatgtgcaatggaatattactcagccataaaaaagaataaaatcctgtcatgtggcaacatggataaacctgaaaggcattattaacatagttcacttaatagtgaaataagccaggcacagacagacaaataccacatgttctcagtcatatcaggaacctaaaaaagttgatctcatagaagtagagaatagtgaatagtggttaccagaggcctgggagggtggtaggaagatggaaagagattagtcaataagtataaagtcatagatctgaggaataagttttgttctatagcacagtagggtgactatggttaacaatatcatatggtatctctcaaaacagctaggagagaggattttgaatcttctcaccacaaataaatgataaatatatgaggtaatggatatgctaatcatcttggtttgatatcattacacaatatacacatatcaaaacatcacactgtaccttataaatatgtgcaatcgtatcaatttcttttaaatataattttatatggatttatttattaattttagtgtgttttctcccactttgtaaacatagagtatttggtttttggtcacccactattagattctctacaaaggaattatagcaagattttaaataaactgcctctttcaaattcctcagattaatctttgcttgaattactttttactcagaattgaagtgctgcagaatgacctgaagttcacatgcatttatgcatgttagtttgagtatagtgttcaatcctgtcaactgttcacttcatcattctttaaaactagttttagacctgtgttataccacatctggaatctaaacctaccatcaaagcagcaaaatctgtttcaggcaagccctactgcattctgctagaagagctaaaccgtgatttaaaatacccagaagtgctattctagttccttccaattgcctatcatccagtgttttgtaacgcagacacccttagggagagtcatggaggtctccaagcccaggcttataaaagaagaaaataaagaaaattaaaaagttcttcaggaggaggaaaactaatgcattatcccaggtaaagggccctggaataggaaagtctcctgagaaccagaaaggcaattatatgctaagattgggattcaatgttctcgtaagtcatatgactagacttgacttcttcagtctccctctgcacttcatgtattgccaatggtcctccacatagaatgaaagggagagaattatggctgaaagtcttaaaatgtctggactcagaattctacagcgctgacagatcatcctgaaacaaggcttgcctagtttagcctctgtctctgcaaatctactttactgaaagttcatttcagtgccgctcattggtaggaataaaataaatttcaacagaaaaaaaaaacaggagagaaagaagttattaaatccatttctagcctagaatgcaattttggggtgtgtggggacttagattcatgaaagtaaagatgaaagtttttaattttgaaatcagcacaaactcccaaggaggcaaggaaaagggcatggggatttctcctaccttctgtggttccaatctcgatagtgcctttcacttggctgaagcaccatagtgtgtcctgggtgagtgtcccaattcctgaaaacaacacaaggagacacttcaggttaggtaagagctcccagttgttcttaagagaccaacaagaaaagaaatatatagcagaatctatgcatttctaaaaggagacttgcacaccaggtatcatctcgtcagagaagagaccctagtgagtcctgagaggacggtcagtctgcaagtaccacgtcctgctgtgaatcactgctctgtctcctccgtttgaccaggccaggaccagtttgaactggagcaattggagtttgtcccttctcaggccctggcagcgtcctggagtggttacgaaggacttgcagtcatcccctgtgtgactggcccttttcacgggaatactaatgcttttgattgttttccttctgtgatggtggggaagagaatgaggcagttcgttaaggggtgagaggaaaagaaaggcaacattttttttttaaactgggcttcacagcttgcatggttgagcggccagtaaggggtcagatacccagagcacttccatctctcttgttcacttcttgactgcttgccaaagtcaggctgactgcagagtagggaaaaacaaaaaaaaaacaaggctggggatggggcggggtggctcacacagagtttgggagtcagtttctgacaaatgtggcctattttgttccaaggttatttttgtttcagatccagttggacatttgatggggctaaatgttctgggtaatagtgactcctggtttctacaaatatatgtagccaatactaatgaatatatcaatacatatattaagagatattctaattcctttacatattcaaaagagtcctttacagaacacttctggatagcaggggtgccagttttcttctcaacagcatgaacattccccttcaattcaactaggtttcaaaattcaagagaatattgcagaatcaaattttgggagatggtatgaatttaagaatgattaaattcagtaggaaaaaaaccacaaagtttcaaaaacaaattgacctttaaaaatgcacagggatctgagtagtcattttcattgtcagccatagatttttattgaattcctatacggaaaccttcatctgcttagccacacgagaggagcattgcctctcatatgctcttctcagtgttgttgacgggttatctgatggaagtagtatagagtcatcattaaaagtagagactttgcaattaggcagggtttatagttgggctctgacttgggacaagtttctaagcataatgagacagtttcctcatcttaaatggcaataataatggtacccatctctcagagttgtggatgttgaatatgattagcacagtcaagaaacttaataatggatattagtagtagtaaagattgattctaaagtgtttcatactaaaaaaaaaaaagaagaacattggctgagaaaatttcaggcactgtggtaagcacttgacttagagtaactccattcttacataaatcatggggagggcattattatcatccccactttacaggggaggaaactgagactcaggaatttttggtaactccctcaaggacacacctagcgcatggctaggttgagatttcaatcaagcctgtctgacttgcagtattcccagtgtgtagaggttggatacccatttgacagtttgggccctttagcccagtaaggcttcacagcaagaatctcatttggaaggctgagctggaatacagtttcagatatcaagtagtaaagtatcaatgtctcctttgagatgacacagggctaaaacttcctaataaaattagcacctagaaggggagaaggaaggcctttagcagcatttattagtgcatagacagacacacccacagtgctgatcct

SEQ ID NO: 477 - DNA, 372443 bp, Homo sapiens
  source 1..372443: mol_type = genomic DNA
cgcggagttgcacgtgtgggtctcagtggagccgccacaggtcttattacacaacaaagggcagggagggcaaggccaggagcctcgcggggcggcgcagagaccccgcatcgcgggcgcgacccctgcctcgggctcaggctgactctgcggcagctccaagtcccgttgccgggcaggacttcggtgctccggaagggtgcggggcagcaacctggccagggcagcgcctcggtttccttccaattcattctcgattcccagatactcagatgagaaatccgcactcaggccgtcaggctcctgggcccgggccaccctgcctgcgctcagcccggcccctccgccgcagcgcctcggagtttgggggctacaggggaagaggaagcgtctggtcggctcccgtccgagctgctccacctgcgccgctggcctttccgcccgctacgcacctgggccccgagaggccagaggggagtgtccccagtggcccgggtccccgaaggtggcccagctcgggcgctcgcgcagccgggtactcaccttgggggcgcggcggcaggagagcgcgggcggagaggtgcgggcgccctgggacgaccagccgaggacgcctggtgtttggacggctgcccccgcgctgtccccccgtgcgaggcgtgttggcctccgtggcctcgcgagggaccgagggcggcgggtccgagtgccgcccgccggcctgggcagtggcggagcgcggagctggcggcgcctccgctgttgtttttgagccgcgaagcccgaagcagcagccgttgggtgggggcgaaggggaggaggcgggggccgggaggcgcgaggggggcggtggggcccggagggggcttcggaggagccgggttctggcgcgcgagccccgacgccccctccagcgatcgcagggcggggacgggggccgaggggagaatgcaggagaaaagcgggccggggcgacggggaacgcaaagcttttaaattagtaatcaaacgcagtaaaacggagcaaaaccagcccggactcgcgtccgaactatcggcgcgtgtgccccgagatccaaggaagtcgtgtggaaaaccgcagccgccgccccatcttcggccccggctggggcgggagcagcagcgcgacgcgccgcgacgcaggggcagggtggggggatagtcacctcgcctccggggccacctgggtccttttaaagtgtccggggtgcgggccccgggcgggagcgccgaacacggaatgttttcttaaagggccagttccgagctgcgctgaaaagggggggggggagaggggggagagataagtgagacgaagaccgagaaggccgaggagagccccccaatcccgcgccgaggcggcggcggcggcggcggcggcgcgacgatgaggatgatgaatacattgcaaagtttttttggccccggcgaggggtgtcagattgagtgctctgtgcgcatgtgcgaaggtgtccaaactgacaatgctggggagatgaagatagtgtgtggctgcttctggactcaaggaggaggagagagattccgcgagccgacaccatgcgatccaaggcgagggcgaggaagctagccaaaagtaagtctcccgcgctcggccgcgccgcgccgccggggcccgggccgccgggccggggcgcccgggccaggggtgcgcgtcggggcgcggccggcgcgcctgcggctccgggcccccggctcggccgcgcggcccggggggctgctccgcctcccgcgctccggggcgaccgggctcggcgcggaggctcggggcgcccgggccgcgcgctccccgaaggcgccggccccctccccgcggaaccccctccccccccaccagtgtcaggcgctcgggcccgggaacccgaggcgcgcggtgggggccggggaggggggcggagggggagggccgggggtggaggggagcgaaaagtgaaagttagcgaaaagttgacgaaaggggagagcaactttttcctccccgctcgctctctccctctctctctccgagtggctctcagtcctggtcaaatcatattccgggcttttgaaatagtgggcgctagagcaccgcctttggcgtccgccagccgggcgcagaggagggagaccccgagccggggaggggcggaggagggggcgcgggccggcgcccacccggctccgcgggcgcaggggcaggggtggcgacggcgggacagccgcagccacttggggagcaaaatggagacttttgcccgggctgggaactgtggtcgtgaagtttatccccggctgtgccccgcgtggtggagggcgctcctctgggacgccggcagcctgcgcgggccgccggggcgacagtgcctccgacaggagggacccacccggccacctcccgacccgccgctgccgccctcgggcccgcgtggacccctctgtacccgcttgcctggcacagccgggcccggcggggacagagctgccccggccaggctgcccggtcctcggtcttactttctctttcgctccgtctcggccgagccccgggctccgcgcgccccgcctgccgccagccggtccttgccgcgggccgggtgctccagccacccgcgccctcgcccgccacagcgcctccgagcagcccgcgcgcaccccgcagccccggtcgccggcgccatccgcggtgaggcgggcgggcaggtgaggacaggcggagccgcggcccggccagcgcggctcccgcagccccgccgaagccccggctgcagcgaagcggccagcgccgcgcggagcggaatcggcgccgcctgctcccgccgccccctcctctgcaggccgcccgcccgcccacccgcagaagaggcgcccgggccgctcccctcgaggtccccgcccgacccacgccgttccgtccgcgcctccggggccgggtccctccaggccggcctcgcagctcccggggccgagcccccaaacgtgagccgggtgcgcgcgggactcgcggcggttttccgaagctccgctccctcggctcggggcccgcccggctcgtcccaacagctgccccgcggccgtaggccccgcgctctgtgcaccagggaaaagcagctcccgagtttgtgccggacgctcctgcgccccgccatcggccgttcccggcccctgggtgaggcgcccccttcccgccgcgctccgctgccgggtgccctcggcctcggcctcccgtgacctctgacccctcttggtgcgaacaagaccgggcgtttcgccgccgacgcgaaggggctgtctgtgcgcggcgttgcgggccctccgcgcgtggggtgtgcgtgtgcgtgttcgggttcggttctgtgtgtgcaccgcgggcctgctcagagtcgggaccaccgggctgcgtgtgggccgccaggtcaggccctcgcccaggatgggccctaagctggaacgagaaaggggaaaccggccgcgctgacgccggggccttcgctgcaagcgagaggcggactcggcgcacccgcgcggccctggaaacttccgagaggccccagctctccgccggctccacctctgccaggtggggaaggtggcccgggaccgggtccgctcaggaccagaagtggtgcctggcagccatctggccaggaggccggagagccgggcccagcgggagcgccgagcgctggcttccttttcccgagagtctttagtgaggaaaaaccccatgagaggtgactgccaggcctcggccctctgtccacacttggccgagcgctgggaacccctccttccaggctccacagctgggaccgcttgtcccaggccccccaaggtggctgaggcaggttcaggatcacactgcctgccctgagcaagaaggcaggatccgctgaagaatttcatttcatcaggcgatattttaagcagatgtgaacttccccggggaccatagtccattacccgagtcagaggcggtagggccagcactccagccagcaggtcctcccctccccacaatgctgaccaggtcaggggactgtggggttgggcaggggcaaggtcatggttaccaggttggtattcaggctgggcacagaacagcaaccaggccagtggaggtgaccccatgacccagcatttcgggggccaccgccgagtgtgcatctggaggtgtaatttcgtttgtgtttccctggagaccccactccaagcctcagttcaggtgggttagtcctctggattgggtcttgtgaagggccaaatggtggcggctccgggggtgacccgggcttccagctgagctttccaaggacagaggtggccactggggcacccaagccggggctgtggctcagctgatgggaaacctacagcctcctccacctgagcctgggggccaggaacagagtgaggacagttcagggacagggtcccccctactgaagccagggcggtagggccggtggggtaggggctgctgcagccccacatttacaaactcaatgcttaacaaaagcttattgtttccagggctgttgtgagccaggtgggcaggtggggggttagcaccaccaaggtgctctctggatcaccatcgccctcatagcacagctgggggcctctgtgcaggaggaggatgtgccagtcggcacccccatcagagctgctccttgaggcctgatccccacctaggtggcagaccccatgtcctagatgccacataccccagggctgggggagtgtcctctccacaagtcccatctagcccctggggtgggggagctgcagcccccactagatggggactgtgtgtgtcttgctcgtgtttgagggtgatgcgtgtggaaggtgtgctggagacagggtagaggtaagcggggctggcggcccagttcacagcctccttccttcttcgtagaaacaggccaggctggctgggccctcccttctcccaccctccctggggcagttggccccgtccaccagtcccctccccagagccaggacggcagccttccctctgaaggccggttagggcagcagcgccaggacgtccggcgggaatccagcgtcttgccccgcttcggacgaaaacacagaggctgcggtggaggggtggagtgcggggctggccgccagggcttggtgccccacggcagtggactgtgtgtcacccacaggccccctccctcagcccctggctgcgcaggtgtgccatggctcggaagctggcaggaggggcttgccaagctggcttgtggagcaactgctgggtgggctccttggggacaggcaccggccatgcctggctcgccaaccaccagacgcccactcggggggtcctccttgtcctgtgagcggctcttccagagcaggtgccagcccgacatcctggcccctcctggccccgaggcttcctcggctcccaagtcctcctgtaggcagtgcgcagggcaggggaccaggtctgccatttctgccgggaggctgggtgaaggggacccagcagccaggggctccccccaccgggcccctcaggggaggtgaggctggtggcagctcgctgggccgctgtgggcccgattagccccctgttttattcaattaggaggcaattagggatccttggggggcttgggctggtaattaaggtgatgtataattagagtttcaacaaaaattatccgggattaaaaatcttttgaataatttcgtttaaaattttcaaatagcgttaaatacaatttatcaggttttgaatcaaacccgtgtaacgagtcttggaagctgcagctcccgtcgccggcgcgggaggaccaggagcagctccggcgacttccccgtgcgggaaggaaacttcgcgagcgaagccagctggctggggcctcgccgcggtgcagcggcggccgcgggctcagaatcgagccaccgagggctgcagacggcgtgggccgggtcggggagcggggcctgggggaccccgggccggccggtagtctcggccgacttcccactccccgcgcacaaagtcgcggccaactaccgcggagcagcgcccgcgtccacaccgcgcagcctggcgccccgaccctggcccagcgggagcggcgctctccccttctagagccccagcttggaccccggggtcccctcctcctggcctcccttgcggaggagggcggcctccgcgtccccaaccgccgaccctcgacctcgtgcgggacaccgtgggcgccaggccccccgcttgcctgggttccctgcgacatcccgacccgcgccccgagagacgcgggagcgcgcgccgcctgggtttaagtaggggctgtagggggagggaagacggtgcagagaaacggaggcagagggtgggggtctggctttccagggtagacccgcctgcccagtctgatccgcagccccggcccctgccggcaacctcgggagacgggccgggctccctagtgcacttgggggacaggacacctcctcccttcactgaccctgggaagacagagtgcaggcgagcaggcaccacttttgagagtgagaaaccccagacgcagagaggtggaggaactcttgggagggcacacagcagattgaggctccagtgaaattcagtggaatgaagacctccagggcttcttatgtagcattcccctcccccacagagcaccacaggctgccgttaattccatagggttttttctgtgtgtgtgtgtgtgtgcgcgtgtgtgtgtgcgtgtcagggtttaagcattttctcaaggccaatgctcaacttgtagcaggtctgttcttaaaaagcaggcaggacatcacgtgcgtccagcgtgtaagtgacctcacacctgcaggctggactcccgctgggctccgtcccccacagctcctgccccttctgtgggtgttctgtccccaagggcaggcacagaggagcagaaaccttggtcgggtggcctggcctgcaccctccacactccctcgctcactgccttcatccggagcaaatgcaggaggctcaggttggcccgggaggtgtaggacctgccctttgccacccctcagatctggaggggaataaccaccacccaccgcctccacccaccgcccagcagtcagggggaggtggagctgctgctgccctgttggtctgagctgcagggtggaaggggccggctgctgacatccctggtccagcctggcgtgggccacggctcctgaagtctgggtgtctcctaggctgcagccagggccacggtggtcatcctgggccaggagtgctcccaagctttggtgggcccagagcaggggaggagtggcctctccctggtctgaccacttcactcttgggcttttgccatcaaatcctccacggtctggaggtgcctgggctggcccgcctggccggcctagcctgagacgcgggaacaatgccccgaggcctgaagataggagtgctggccgctccaagatcatatttgtttaatagttaacattttgggcagaaaaggagggaagtcagattctggtgaaggttttgcttattttatatccactataactatttctgtccatgaaaattggcttaattatatcaatggaatgtttctttttcaattctgtatgcaattagtccatcttgccggctgcaatttattttaataaaaaaataaaccagtggtgtgttcagttcctcgtcccctggggacaaatgcgattggtgtgtttaatttcattaactacaatgcggcctactggaaaaatgtataaaatcagctttatacagcttaaacactggcatttgaaacaaatcattattgcattagctgtcacactggtaattctagaatctaaggaaaaaaatatattatggctgtttttataaccctttgcaaatgcactgttaaaataatttataatcattttaaaacatggctgggtcctagtgactatttcatctcctctgaataaggctctgtgccgtcccatgcgcgttttccgcgctgatggcggtgccgtttccgaacctgcacacgcacctctcagagtggaggccgtggagcctgtgttgaaacgaacccggtgaggaggggtccctttttcattctggcctgaaccccactcgtcaggcggagcagtgggtgcggcgacaggctcatctgcgatccacctcgggccagaggggaccccagaggccagggcggcagaacctcagcagctgctgcccaccatcctcctgggggaggaggagtcacgcactaggcttgaccaagagtgagccaagccccccacgcgtggggtgcccacttcaaatgtgcagaaccaggagcagcctctgctctgcccacctcgaggccctgcttggcaaagcggctttctgagcctgctgtgagggaacccaccagccccgcgctcctctcaggataacaggcttcccagcacactgtgcagctccagcccgtgctctgtcaagcgtgggtgtgtgaaggggtgtgtccaagcacgtgtgtgtgtccaggtgtgcgtgtgtgttgcgatccacgtctttgccgcagccctggccacgtctgcactgactctgctggatgaagggagggtgtgggatacgtgctccctgtccggctggtggggacctggggctctcagaggatctgttggggcggggagatgagggaagagtttgcttttcctgcttctgagatgtgttctgaggaagctgagttgtgccactgaagcccttgctagtggccgccggctggtcccctgcgtggagtggctcagggaaagcgtcagggcatgcaggagcagggacacatgggctcagcctctgtctgctctcagcgtccccgggcagaagcactggagcctggggcttctccgagggtgtctgtctccttcctcgcccacaggtagtgccagggggcattaacaggaaggaaagggctcaggaggcttagctggaggccaggggccagggctgcctttgcatgggtgtgcgaggagaggttttccaggctttaccggggcttcttagtttattcccagaaaccggctcggcttccttgggcacactaaggactattccctgtccctccttagccttccgacttacctggatggatttacttaggtttggttttctcctctgacaccaaatgtatattctataaggaatttaaacatggggtgatggtgggtgtttttgggggggacacaggaaactccacagagcacacatctcggggtatgaagccccttcttgcttctcagaggggctggtctgcatcttggctggctctccccaaacctctggctctggggccagtccccattgaagtgacccccacagggcaggtctccaggcctgcggtttgctttctgtgtggtgtgctatggagttgggaaatcagtagctttgtctcctttcccactttagaagaataacaaagctgaatgtttggggcgaatatgaagtcctggtccacgggcctcctggaggctgctggcgaggtctcccgtgggcccgggccctgccccctgacacaagctcaggagcatcccacatcagccccagaaacccaggctctgttcaccccaactctgcatcgtgtgtgtgtcccactctcccagggtccccagccccacgctggcctgggcttgctgctggccccctccctcactgctgctggactctcccctttgtgaaaccaggtaaaggtgaggacgctttggagaataaaagtgagtttgaacttggttgaagtgctgcgatgtgtgcactcgtgtgaacctgttcctccagcaggggtgtctgcacagaaggacctggaaggtccaccagggtgtttagtaggtgctttttcctggaatttggggtcctggagccaggctggggtgctttacaatgtctcctccaatcagccaggcagtcagatggggagttttgtttttatctccttggcctgtttgggaagctgattggtcagtcctcagcctcagcctttgtgggtgttgtgcagggtgggtgtgcaggctgcaggtgctcacaggccaggccccgtgcgtggaccaccagcactgtatcgttgctgtaggcagggcccgggccacatcataaagccaaaccacactggggtctcccctagcctgcagcaggagaaccactttgacccctgccttagagctcagccctgaaataaaacatgaaatgattgttagctgctcatttcaaactaggaggcacaggtgccagaatctgttctggcccctgccacatgcagtggatgcctcccctactgcctccccacactcagcctccctgggtctcctctgtccttgcctctgtcctggggtggaaacagctgttggcacgtgccactttttttcttatcagaggcctcctagttcttgcagggggctgggggcttctgcaagttccattcccatccgtcctctcatcttcccctgtgtcaatcatggtgtggtgggattcctgtgtgccgggctccgagacctgcatgtcagggggcagaggacctctccagctgcaggatgcatgctaggggcccacctggagggagacagggtccccgagctctgggtggtacaggctgcctcccgctgtggcgagtcggggctcagcagctccacacagactctgtgtcctcactggggagtggtccctcgcctgggggtctggaccatggtgtctaagatggcaggaaagccagaatccaaccaacagctcaccccaacccccgccgctctagacatgaggctcagggcctcctctctgcactggcgcggaggtgcctgttcccagccctgtttcacattcgaaaggcccagaagagagggagggaggctgccagagaggagggttatgtaattttctttgctgctgtgagcctctgcctctctctttttaattcggtagttcaaatgaaattcgtttctctagtacctgtggcaggcaggacactgccaacgttttagcggagggaggaaatgacggggtgcatacgtgaggaacgggctctgaatgtgactgggagctcttgcccgtgacatggttgaatccctgtatctgatccagacctggcagccggtattacagcaactatggatttccataatagacttcaccatggctcccgtagctgggtctcccagggaaaggggaacgcattgaaaaatgcccagacatttctctctgcccaatgggctgtaacagcctcgtcagagaggctggtcatatcagtccgtaaaacatttaaacaaagaccaaaaatgacgctcaccggaggagcccaaacggtgaccgcagggtggctgcggtcctccccgggcaaacaggaagttggcgtgactgtctccgacggctccgggcattaatcctcattttactccctgctgcccaccgcctccctggtggagccgcgtcccggaatctccgccgctgcccgggcctgtttggcctcagactgtgctcccgagtgaaggccgtgatggggaggagaggtctcggctatgtcagcatctctccgcagtggtggcctgagagccccttccagcctcacatcagaggggctactgtcatccctgtcccacgcgctgcctggctggcccagcccctgtgtgtgcacagggctccttcatgctgccctgctggcccagcccctgtgtgtgcacagggatcctgcggttgcagggctgtcagggggactgtcccaaggtccctgggtccctttcggagggaagcctgtaatgcagagagtgtctattgacttggtgaaaatactgctgccttaggcagcagcaagccgcatggagcggcctggccccagggacgtgccacaggagctggcttgctgggagatttctggccttccttgcaaatcacccgcaggctcttattcctggaaaacccgatgcgtttctgaactacttgaaaaccagagggtgttttcttggccagagctgagactgctccagggagaagtggcccctcacataccccttcatctggctggcatgttgagattgtctccagggagtgtgaggacgtgtgtgtgctctgtgtctgtgtacaacacacacacctgcaggcaagcgtgcttctgaggttggcctgagagggcccgccaagctactctgtttttgttgatcagcaacatcgcacacttccctgccctcttgtgccttgaaagagccacttgccttggctgcacctcggtccttagccctccgtggcgccagagttggttgcctcagtagcgcgtgcccacccggcccaaagctgttctgcagctggtcactgtgggagaagagactggaaaagttcaaaggtggagaggcggcagcgatctggagcacttttccgcacgctgtaacccctgagaagaaacaaagaggaaacgaggctgtttagataatcccgggccctggtgcttgcatttagaaaaattaggccctcttgaaaaattacagaattatgctgccagtgtcaggttcccagataatgatgtgtctgtgtgtgaaaatattaaattgcaataacacgccgtgcgagtgcctctctgaatggggtattcagttcccagcccaggctgagcgtacagcgagtgactgacagaatacaaatggtgccacgaagcaccggggatttacggccgacccgcgctttccgatcggtttctctaccccggcccatccagccatccttttctttaatgaaacagcccgacaatgtggctaattatttatttatcacattggcaggaggaaaagctatcagagacagatcgatttttccctggaagtgatttggcatgactttaaaaataagatctactaagatatgctgggtggtgtcctctgaaaccccaaattttgtttcatcaactcggctgacaatccattttgcaaaaacgggaggcccgggcccctaagcttgcagcctgagaaaaagcaaacttgagcaaagccagcttgctctccccctcggaccgggcaactgctcctggatttctgttccgaggaacatgttgggcggtttcttccgggccggggaaatctgagcagccacaggcgaatctgggacgatggcagattgttaatatctcagagccccagagactcggcgtctccgaccctgagcccacatgagtagcagaaccccggcccgagcacccaacgcttcccggagagcttgtgtgcctgagagtgtgtgtgtgtagagggggtggcggggcggggggggtctgcacattccgccgagtgtcctcatgaacaaaaggcctaaaaaaaagcagagagtaagggagctcagagaatcggggggcagatagcgtagccacgaggggctctctggtttcatggctgggaatctgaaccgcagggcagaggccccggagtcttaactttccctccgtcgaaggtgttagtcttaccttcccgaggttagataaagccgctaaaagctgctgtttgttattgaatctcatctgctaattacggcggcgggacttgggttcgaggcccctcgcggctgtaccccgagtcccccgtgctggcacctgataaggggtcattctgtgctctttccagagggttttaggttgcgtccgctcctgacaggtgacccttgttcaaagggaacgaggggctggtggccacggtgggcgtgagaggcccattcctgcagcctggcccggccggcccctggagagccccctccttgtcccaccagaccgagctgtggccgtgtgaggagcagggctgaggtggggagaacgccgacttgcattttctgacagtccccagctctctctgcagagtataggctactgcttggcatcacctacagggatggcggcggccagggttggtcttccttctgtgagcacggggggtgagcagtgggcagctccaggaagccttgctgtggactgggcaggacagctggacctcctggccacacagccgcttcccacccctgggtgtcggtcactagagagtgggtagagcctggccacagggcacgtgggaggcccccatggaaggcccgtgttgggggaccttccatgggcagcagggcagcaagggagaccacctccttgctgccctgactaaacaccagctttgcaaaagcaagaccctgccatccctagctcccctcacagacccagaggcagaggccttcagggccagcagtcaggatgggcagatgaagccacagtgtgccaaggcagcggcaaagcccccgtgagcaccaacccaagccttgcacccctgacatgtggaggcttctgaaattcccttgacgcctcaaatcgaacaccgccagcctccagcctcagaggtggcacctggctttcacttcccaaatgaactgaagctccaccatgttagatgaccttggaccaaaccacgggaacttgatgggcaggaggctggcccgggggccctggtgtgaccaggaaggtgggaggcccccgcggccaggccctctgcagtcaggtcctgtgcagtcaggccctgtgtggtcttccttgaggggaagttttctgttccttgggttctgcaggagcaggcaggaggccctgtgggtccaggagggcgcctcggggtctgcctggccaatgtcagaggggtaacggcccatctgcaactggactcagctgtggccacaggatggggacaggagagtggccacacgtaggaaacccagggtgagggacctcagcctgcagggtctggggaccattcccaaggagcccctgagctgggctgaatggtgttcagagatggggttccggggaaacctccctcaccccagtcagagctgaggctgggggtgcagctccgagggtcactcctggactcccttgctggcatccatgcctcggctgggtcaggacagagccggggttgggggccaatgcccagcaaccccctcccccaggatctggagctggacctggggggctggaggcaccctgttgccgcagcaaggagaggtggggtgcgcttcatctcagctgccccagggctgagctcagctttgcccgctttgtgcggagtccaccgagggggcctgggggacaggcgagattggaaagcgatggggccggcgcctgggtgctgcgtgggagcaagtgcctgtggcccctgggtctgtggccgctgccttcgctttcccctcatctaggacaggatgctcggccctcctgacacttctgggacagatgaaacacagaggaagaggtgggggcgctggagatcgagcccccctgctgggacagtgcacccggaacgctcgcctgtggctctgattattgctattattgtccttaggatccaggcagtcaggagctattttggggtttctggaactttcactggccaaagacaggcttgtgtgtgtgagagcagagccgggcaggctcctctggatgcggcctccagattaaacgtctcgtccgagaccactggatgagcgcagtggcaatggctaggagacgcaggggtcgggtctcctggctgcgccccaccaagcagcaacctggcggctgggccccggaactgcacatccctccccatcatagccctgtcctggactgggcggcgcgctcatttcaaggcagtgcggccatctgggctgggcctggcgctggcggggcctgctgtgtgccgggcgggcagatcgtcctggggctgacctggaagctgtgctgcgtttatggcccagggagacacctttctagggttgggggtttcacccacagcctgggcttcttcatcatttctgtgaagaggcgaaccaaggaatgtcaccagcctgctgcggagggatgccctgcaggtcaggacacacagcgcctgctgtcaggggaggcgggtgtcagcttcatgctgggtggggagggtgggtgccggagctggatcctgccctcgggggtttcctgttagttttgttccagggggttgggggtgttgtttatcagaggggcagtttccacagctgagaggggaagagctgttcctcctcaccccaccattatccacctgaccttccgactgctgggattgtgtctgtgttgtcattgaggggacaccctttggacttgcccagggaactgcaggagagaggggcttcaccgtaatcagcacatggtgcccacacacgcatggaacacgtggttgacacaaatgtgactccatgagctggactggctttaccgtggagacttatgcagagatcagatcaggagaccctgttcgcgagagaagagaacaggacccttgttcggagagatgtccctgggtcttggcagacccacacgcttgtggagggagcgagaggagaggtggctggggacgaccgaatcccagcgctgctgtgggctccctggaggagaaagggccttggtgtctgctgggccagaatgcaggcctttcactcctctccttgcctgggactgcggtcctggcgggccctggggcgtctgggggcctgtacccctcgggtggggcaggttgggctggagccccctggatctggtgtcaggcagacccagaggcagggcacaggggccgcctctggccctttcaaagggacattcgatctgaagcatggggcccagtaagaagattccagggaacacagtgctgatggggccgaaagcgctcggcggccggagagagcctctccacagtctgtgctctggcacgaggccctttgtgggattatctgcccccctgggaggcacggaatgctgggggcgaggggccacagcaatattgagcttgcatgggcccccgataaagcggctgcttgctgcagttgctctgtcgccgaaattcgaggtgcagccccagaatggaggccgctgtccctggacacttgagccagggaggcaccgtccattctgcacttgtccttgagaatttgagtcgaggccacatctgccagcgcttatatctagggctcccacccgcttcaaaaaacacagtggggcagaaaaacgtccagagaggcccaggcagcatcttcccttccagcctcactgttctcgggcgtcccccttggatcacaaacgctgagccctgcaggctgtcggggggcaggccagggaagtgattctttgggccagtagctctcgggtgcacacctggggctggagttgcacagcctgtaggtccagggtggctgccaggtggagaggagctcagccgcgcaccctgcggcaggtgttgcaggcgggcgggtgctgggggtttgtttccagcagctgggatggtttctgcccagcatccagccccttttcctgcaccccttggtccccagccgcacctctctgtgtcaatggacagcctaggcagcagaatagttacttctcactgccccaggctggtgcccaggacctactccgacctagaacgttcgtgcaggtggaatctggacaccaccatgtgcagaggcagtgcagccttgggaagacccgcctggccaaggcctctgaagcctgggtgggtgctgggagggtctcagagtttcctagagccacggctatggtggccttcgcttgctgggctgggatcatcccacagccaagaaccaaggtgcggctagatacccagcaggacctgggggactacaggggctccgagtcccctcactgaacaagctgccaactgctgggacctgaccctgggcagcagggccccccagggctccccattctggcagcatctgctctcttggtctggctggtagtggacaagggaaggctttggctcaggccaacttggactgaatcctggcacccactgttcaaaagctgagtgaccccggctcctcctgggcctctctgagcccagtgtgcccatctgctgagtggggtaatccatcctcgtggggctgtggtgtcatcaagaacgggtggtccctttaggacgcccagcatcctgcccatgtgtgtgtcctcctggaggccatggaagggctgcactcagggtggccatgccaggtctctttctgccgcctgggttgaccttctgggccacaggtcgggtgggcagcaggtggccctcagccaggactgcctcctaccaggcctacagggccccagatgggcacagctgtgggagccccacccaggccttgtctccccagagctgcttggcgtccagcagggcgcccagccctgagagttggtgccccactcacgtgggttcacgttgacagaggggagggacaggggctgcacctgaccccatgccctggtctgggccataggctgggcaccttcctttggcctaagtcagtctcagaatgcgtacacagctgcaggcacacagacctctgatgaaggtcaccatggcctgaggcggctggatgctggtctcctgcaaggtctctgtctacacactccaggtcccctcctctcagggcaggacagatggggaacctgaggttgctcagggtgagctcgtgagtgcgtgaggccttaaaaaccataaggtgcttgcctggctgtgacagccagggcggctgagcctggctctgccctgggcgcacctgctgcgacccccaggctcagagtcctctcggcctgcagtttctgttgcaggccaaggttccctgcccccgtcaagtgatgcagggatgggctctgagtttcttggtcaggaaagctgccacggggctgctacccacatgcccaccctcagagcctgtgctggaaaacgcccgaggtgtcggtgcagtgtcctccctttgcttctggcctcctccctccgctactggcctcctccctccacttctggcctcctcccgccgggctgccttgtcatctggatgcttcctggtcctgtctggaagcacaagggctgggaagggaggctggggctcccttcccccagctgcagcagccagacccaggcccggccactgacgccctccaccggagagtttttgggtggagattttcccaagttactccgctgcttcctttcggagctaacgagtggttcttggcgtcgtctgccggggcttgctgtcttcatttctttattttttttgtggagcatgccgttaattaggcaaaagatctgcagaaatgcgctcgcgcctggagatttcagtgaaaaatgagaagtctcctgaaatttccagtagtgaagcaattaagcgatggaattccgcaatctaaacatggtatcactcacctccaatgaaagttagaaaaagaaaagaaggagtgaaaaggaaaaaaaggaaacagaaagcctgaagtccaagtgagggaagttctcaggccaacagcgacatgctcgtagttcatatggaaacgctgcacgtgctgccggcactgtcttcttgggagcacctgttcctttggaggtgaagggttaacgtgaggattctttcagaagaggcagcctcaccacgtgctggtcagccccacccgagaccagccccacccgagaccagccccacccgagaccagccccacccgagaccagccccaccggagaccagccccacctgagaccagccccacctgaggccagccccacctgagaccagccagggcctctcaccttcacatccctctacagcagcaagaggccccgtaatcttagcacccagtgcaccacagagcacgggctgaggaacgcgagagcaggtggacaggagtcctggacgtcccactctggatcggccggcaggaagttgttcctgccttggggtcaggttaggttagggtccttccttgtctgtggcgggctactcagccccaaaagaggaaattcacatttttctgtgtctgttggggggagtttttagatcataggaggagattgaaaccaactttgatttccctatccgcagatgcattcttagtcaaaaatgcccaacgcaccctgtttccttggacgtgaccaaggaatgccatgtccagatgatcaatccagggatggccggtggccctcgcgatggctggaatcactcttttcaaaaatcacgtcttggttgtgtctgccagtaccatattgtttccatttttactcttctttttttcaccaccttgagatgcctttggacaacaagtctctggttattgacaaatcaattttccagggagggaggcacgtttctgtttgtgctctggggtctggcctcctgtttgtggttgagcaaagattacactacatttctcagtgagctgtttccctccgtcccccgagacacccctgctctttggccttggtgccgccttcttcttgccctcctcatttcactgctgtttctctcaccttctaaagtcagccagcagcctggtggagatttatgaggcctaaacttccaacaggattgtctattttctacattctccctgtgctgctccttcgcctgacctccaccgctgctgccggtgcagcttgcacacacaggagttttgtttggctgagaaatctcctcaccgaggacgtaggcaggactctggagttgcagttgcattcaatcagggagctggggaccggagtcactgggcacagtctagaaagcaataaaaataataataataataaaaatcctcaaaccgcctttcccttctgttgcattcaatcagggagctggggctcaagtcactgagaacaatccagaaaccagtaacaacccccccagcaggctttcccccgaatactcttgggagatgcagggattcttttattatttatttatttatttatttatttatttattttgagatggagtctcgctctgtcactcaggctggagtgcggtggcgcgatctcagctcactgcaagctccgcctcctgggttcaagccattctcccgcctcagcctcccgagtagctgggactacaagcacctgccaccacgcctggctaattttttgtattttttagtagagacagggtttcaccgtgttagccaggatggtctctatctcctgatctcagcctctcagagtgttgggattacaggcgtgagtcacggcgcccggccatattattattattatattatttattattatttattatttatttatttattttttggagatggggtctcactctgtcgcccaggctggagtgcaatggcgcaatctcactgcaacctctgcctcccgggttcaagcgattcttctgcctcagcctcctgagtagctggggttacaggcacatgccaccgcgcccagctaatttttgtatttttagtagagatggggtttcaccatgttggccaggctggtcttgaacttctgacctcaggtaatccacccaccttggcctcccaaagtgctgggattacaggcgtgagccaccgcgccagtccgagatgcagggattctaatagctgcctggtacctggccccttgtcgccccacctgtcctcagcggtgagggtgttttgcaggcctgggcccctccgactcgacgtctgaatggagatggtgtctgcaccagccctggcccctgcctggagaaggggtgtggaccccgaaactccttgcacccagctcccgcacaatagggactgctggtagcccaggctgagcctcgtttctaagagacgttgggacccctgggacccaccccccaccggggctgtgaccccatgcaacacagcaccatagctgcctccacctggctgcaccctccatggtttgggaactcggagctgagggaggctgtgagagctggttagcaggaggcggaagcgggtggaaacttctcagagcacagtagcctgtcagccttcccacgtggggaaaataaacccccgccaagcatctccaggccagaaaaccaatattgtttatttgggcctttctacaatagtgtttctaatttaaacagaaatgcccctgccggtgaggggctccccgtgtgactcgctctggggcagcagccactgccgaggaagcgcagggagcctctggtctggcattgtcgaatttccctggtcattacgtctcctccgggccgagcctgatccaggacttgcatcccgaggccgggtctcccacccgcaccagggatgttccatttgatttaatgaaaataggaacaccaagctggtgacttgctccaacttcctccggccgaccgacaccagctgcagagaaagctgctcagaaccactgtgacccagcgtctaaaatccactcattcattcattcatccattcattcctgccacagttccatgactttttacgggtggtccctactctgtatctcccaaatttctaagaagctctgttccagcctcgtacttgttcacagcttcaccggacaaataagatataacccccgcaaagtaaactgccatacaaaggcaaacaaaccccccagccaggatggccctgtgtgctcattcgtgacatggggactggagaagagaatgccagcaagcttcttgatgcccagatgcaccccgaacgccaccacggggctggtcccccacaggacatgcagcgtccagacctggcctgggactgcccagcagacggggcttgacactgagggctgtgactgccgctttcccgaagcgcttccatccacttccaagggagtccagctgggagactcaggcactggagctggtctcgtgagaagcgccacatggccctgaggctgggtggggattggtggccgccgttcggcaggcctggtggaactcctctgagcctgcgcacacaggccgggcgactggctcccctgagaccacccatgaaacgtggacattcctcaggcagccagtggctgttttcacccaaatggaagcaaagactgggctccctgtgctctctccaggtgtgggtccctgctaagaggcagattgggtgcccacgcccgagggcttctcacctgactctgtccctgggcagactcggccacacagcctggctactccccagtctgacaccaacaggtcacgtcagaaccccaaagcctctgactttgaacttggctgcaccacggcctgaccccagattgaaaggggccaggtctttgcctgggcattggcccctgaagcccatgccaggcatctgatttaggttcccaggagcagcagctgacactcctgcagggtggggaggcaggaccctcaggctccgagccgaaagcagaatctccaggacctgcttcagaggcacacaggcctggatgtccttgtgtgtgatctatggggagccacgaacgagaagcagacagcccccagggctccagggtctggctcaggaaagtcacgtttctccccgcaagtctgcccggagacctcagccgcaaactctccctaaccccgagctctagctctggacggggcttcttctctaaatgccaaggcgccatgaagagacacaaatggaaagacaggaatgaccgctaacagggagaccaaatcctgtcccaaggagccaccgaccaatagcagcttaaaccacacagagcgcttccatcagacgtgacctggccaagccagacaggctctctgaaacccagggtatgcggatggggaaactgaggcctagggagaggctggtttggagtggaggtcacctgggacgttaccagcactggacttgacttaagcgggtgcagccaggcccgcaccgagacgacagcatctctttcatcttccaaggcccatcttcctggcaaggcccaggttggcaacgctcagcttttcagcaggactcagatccagggggagttcgtgagaagggcaggggttgggccgaatccactcctcgtgccggctcctctccacgcctgccccgtgccacacttctccgtgcacccctcattcccttgggagagtctgagggaggctggggtccttgctgcggagggcacctctgcccaggcacctctgctgggcagggctgcagctgccttcactgagcacccatccttccagcagctgtgctgtgctccttccatgatcaccccacagccctgcggggaggggatggagctgtccctccatagatatatgggtcgtgagctcggggtgtagccagctgctccaagtgtactcaggctgatggaggggcccccacttgccccgactctgtgaacctggagagaaagggcctgtccccagagggcctccctctaacgggggtgatggacagttcgcaggtggtcagatgcgagagaattcacatcgcagaacctgccaggaaaatcaatgggaccgtgaggactgctaggtttgggaggcccgcgttagccccaggacggcttcatggggaggggacgcaggtccccatgtagaggataagatggagccagccgtgggtaagggtggaccacgcaggatcgcaggatgctccctgggcccccatgtcacggcactgctgcatgcttggtgttacctgcttgtagacatggacaccaggctcagagagcaccacgactgtgcctggggccccaggtggtgggtgacgtggtatggctctgcagcagggcccaaccccaggggctcagagaggcagtcctgcagggaggtgccaggcacgagggctgctcttcgtgagtcccgaggcagaggctactgtgtgctcctgagggtatcagcccccaggggcaaaggcacccggtcctgccccactgctcatccttaaagccttttcctcacacgtgcccataccctgcaggcaccgagtgccaccagcacttgggtccatgaatggagcaggtctcaggatcggggcattgtgaccatggacatgctgggagctgtctttttatttccgtggcaaaatgtactgtttagttagaaaacatccagcactcaccatttctggtcagcgagtgggaaatgagtgggaggcacacactgcatccccctcaggctggccaggcatcctcagggctctgtggaggggtctgcacaacttcgtgctggatggcgcctgggtgcggggagcctccttcctctggctgggcacccccggtctgggctctgagccacaagctgggggctgatgcactttggggtctcccggcagctctagggtggcaacctgggctgggattggggtcaggggctgtctcagggaggacatgaagtctcaaggcaacatcttaaacccaggggcaaaggggaagatttgcagctgtggcccctttccacgactttgacatagacagaagtgagaggcagtcagggctgctacctcgggcccctgggtcccctcaggcccagtgcttcctgctgcagggaccgaggtggcgtcccacctctgtaatcactgtccaactcctgtaaagccaggaacatggggccagccctggctgaccgccctcaatagtaacttccctgagctgaccgcttctcctgacctggctgagaagtgagaagtggtgagaagaggaattctcaccccttcatactgttttcctcacccaaatctcttgaagggcccaggctggctgatgtcaggagagcccaggctacccctatttcagaggtaaagcccaggctagcccgatgtcagagcagagcccaggctagctccatgctggggcctgagcctgggtactgtccaacgttgcgatgtttggtagcaccggggcagtctgccctccacatttctgtacagccagggtgcaacatggtcagactggggtgcagctgggactcggtcagaaaccatctgcccatgaagagtcctcttccagaattgattgactgtttctccagactttgggggccctggaatcaagtggggaatgagagcccaaatgccacaggttgtgtgctctctgcctctgggcgccctgggacccccggcatctccactgtgtgtctggtcgtgaaggctgaggtcgcagtgcctgtgggccccttagattgtggggttcacatgagttctcggaggctgcatgctgtggtcgtggtgagaaggaggggcagaccctaggaaaggggtgaaagccgggcagggagggacccctgcagcggagagtggacagcatgaggctagcctgcaggagctcagggcaaacgcccactcccacctggctgtggctgagcaatgcccaatgtagcccagctccgaagcgcagggaaggagggggaacgtgcgggggtctgtggggccaggcctgtgcaccccatcccactcgggcggagagcaggcgagacaaggaaggagttcctgacaaatttccctgagccccgagaattttttagaagttgccatgagtgtgtgggcttctgcgattctgtggtcaggctgctgtgtttcaggaagtgccgagcagaagtggtggcaccagccagcaacgtggtctggggaaagtggtggctgcagccagtgtggtctgtggctgctggtgacccagaaacaaacacctgagtgtgcagggcaagaggcgggcggggcacgcagggcagagctggggaggaaaaggggaactctcgccgcccaggcctggagccgcggaggagacaggtggctggtggcacgggggcgcacaggcagcaggcacccgccatccccaccctgcctccacagctcccaggtggctcctaagcaccccttgggcagccacggaattgtcagagcggaacgacttggaagtaaattcgagttaagtgcagccacatcaccctgcagagacgtgggctcccaaggtcaatgctggcccgtggccccagcccgtctcaggcctgctcatgccggactggcagctgttagcttggcatcaggatccggtcattcagagggcagtttgggcacaggagtgcagacatggctgcccttctaagcccccagcaggttcagagccagggccgggacgctataaagcttggccgtcacttccactgggccctggagagctgtgatgaggaggtgactttcatgctgatgaccaggaatatgttttgcttattggtgtgaacagactcctttcacagaacacgcagacattctgtgagcaccggcccagcaagcagtgtcagtggctgcgccgttcctgcttaaatgagcaaggccttcgggtgcttcccggcctccctggactccctgcagccagggaggtggggccttgtccctgctgcggttgccgagggactctgggtgggaaggagggggtctgcatgagtgccaggtgtgtcttccttcctggtcttttccgacgtggatggagccacacagcccggaaccccggtgctcgtgaccgagaccttctcacagctgcatgggggaattgcccgtgctgggcgagatgaagccagcaggaggggacggctctgttgccctggcctactccccggttggggagatgatgagccaggcttgtcctgacggggcactggcccaggcgagcagccaggggtctcccagggccctgcccacctgcctgtgatgagaaggcccctctccagctcagtgcgtgaaaagccaggctggagctccacctccccaaccgccagtccaaaccatgctggcacttggtgaccaggcctcagccagcagccctgcagctgggttgaggtggcccagggctgtccagggaggtagccgagaagagggctgcggagaaagtggagtagcaaacaactcggtgtgtctccaggggtgctgggtgccgctggggtgccagatgtcatgggctcagacctaccctcatgggtcagatggacagtggtatccccctcctggggtggggggcactcctaaggcagaaaacccataggacctggagcacagccctgtgcggctgtgtcccggggcagcccaagcactgcgtggtgcctcatggggggccgggctcagctgctggtcctccctagtgccccctggactcagcttccacatccacaggattgacaggacggtctcctccttcagatgccctagggacccctgtgctgccctgagacacagccaccccaagacgcagcctcacagtgtgtgccgtgggcagcctctggcctcggccaggagggtaggatttgaggggggcaggggtcagtgtgggagatgactctgtggagttgggggtgatgtatgggggtccatctgccccttggaatgccctgggggctgcttggggtgccccaggggagcctcatatcacagctcactgtgcgggtcctcatgctcagagggtggcctttgcctgcagcatggactcgaggtccgctcagcatctgacaggggtctggggccagtggaacgtcacactccctccctccctgtctctcctcctccaaacggctcagtgggccctggctgggacaccccactttcctgcaaagccctcgggacctgccccctaacagtcctggctgcctgtcacccctggggccctggtgcctgtctatttggggtgcagggtacgcaccccatgcttagaatgttctggaccccaggaaggccccggtgctttgaacccccatgtgggcaggaacctcggctttcctgctcctcttcctccttatctgccttctttcctgcctctccctgagttctcaaacctccctgctcatggcagttccccacaaggcagcctcctcgctgtcctgtcctctctagccccagaaccccgcgggccccttcctcacgtctcctgcccgcaggacccccaggaggctctgtgcaccatcccttgtccacgctctcccctggccaagtcggagccataggggaaggaatgaggtcatgggaggggaggcgactgggcctgaatgcagagggagagggtctgtgtttcgaatccacaccttgtggctgatgctggaaaccactggcaaagcctgagcttcccctctgcacctgcctcttcctcttttgccggctggggcacattccctccctcagtgccttgccgcctgtgtgttgaaaggtcgtgagggagggacgccagggactccctctcctgcccctggaccagcgaggaagacggccccgtcccagggctgctgagccctccaaggcttccggagcaggggtggatggtgagtgggccctctccctacgagagccgagcagggtgggtgtgctgtggccctcatcttcctcagttttcccagtgcctgtctttccttgtgccaaggacgggagtctgggcggcttctgcccaccaccaggtgagacagctccgtggtttctaggaagaagccacccgtggaaccatgtaggtgatttcgtgcccatttaaaactacgccgaggctgctctctgtgccccttctctcccaggctttccagtagagtctcggctccctctgggagccacctgctgcagccatgggtgcatcgggtgcgtgtgctcctgggggacccttttgctggggctggggtcagacagcgcttcacccaggccgggattctagggagagcggtgccgagaagttgccctcgtagccaaggtcatgggcaaggttaagggcagagctgaggagcctctctctgtacccacagctggaaggggttcagctgtgtacaaaagttttggtctctgacgggtcatctgttgtccgtgtgacctgcctcggacaaatttcccaattcctctgagtacagaaaggacgtgacggtgtctgcctggcagggctgccgagggctgcatctccaaaggacctggtggtgcccagcacactctgggcttccagtgagcagagtcattgtgcataacaacagtggccaggctgccgccccgtgccctgacctggcgtctccccgcaggtgaatggtggtaggtgctggtcagggtcccctcattccatacaggccagaagccagcaccagccaacatcacacggtgatgaacttaaaaatgaattcttctccactcgcacctccaaaagctcagcctccagtgacccctcctggccctgccctctcatctccagcctggagattcccgccccacagcccctctgggggtcttggcctcagcagctgttcttcctaccatggagggaggcagagacaggggcagccacagggtctccccgaggcctgggaaggttcctcaggaagccaggtgtgagggggcgggaggcagcgccttctgtttggcctcgtgtagagagatcccaggggggcccaagcatgcagggatgggaggcaggtgcagcagacgcccctcgagctggaggaggcacagggtgcaggaaagacccaggaggcagaattctgccatgcctgctgtccccacccgtcccctcttcttgtcctgtccctgtgacctcaggcacagtccctgtctgcaacagggcaggtgtccaatggtgctcctccagcaggactggaaactgcccccgcccctctccctcctttgcccgcccttgtgcggctccttcccagtctgtaaagggcactgaggcctcctgtcagtgtgctgggggctgagccttcactgagccgtgtggaatcctctgcaggtgagaagctcccagtcaagggccctgagagtccctccaggctcatggggctggatccagttccccaccctgggtctggaaaatccttctcccgggctgcaccctgcaccagcctcagcccagtgggttttcttggggccggctccctgctccctgctcctgggtgtcaactcttgggcgaggtcaccctcactgcccactggggggttgcggagtggcgagctggcaaggggcttaatggtcagaaagaccagctgtgtctggcccagggtcccacttgtctcccccactcaccgctccacccaggtgcttcccccagactcccatccagctggggagagggacatccctgcagccagagaggttcccccatgggtgaaggtccgacccagagcctggcctccctgggcttcgagaccccaggcaaagccacagaaaggaagtgccccagggagcgtggccactgcactggacccccgccttctaaaatgcctcagtttctctgggggataaaactgcttctcctgaggtctacacgggggtgctgttagttcaaaggaacaagggggttttcagtcttctggacaggcccgggggcttccctctgatgcccttgctgctccagccctgcagagctggctgcctccttgggctcctgggcgctgcatacccactgtccttagctgcctgctgcatggtcctgcaggcgaggctgtgtcccagccatggtgctgcctccacctccccaccaaggacccggcaaatgctgcttctcagtgcccgttgagtggctgagcggcctcactgaggagggcgagaaaaggagctggtccatccctggctgagtaggagggttgggccacccactccatcaagccccatcgaggggacccagagcggtgggggccgtgtgggagcgctgagaagcaagctcctctgggaatccaggtcgcctgcaatgagggttctcaaatgggcttcctgggggctccacacatggcccctggggtgctggacccaggttgagggcagctcggtcagcccttcagctgtggactgcccgtctgaccaacccagttctagccttggctccgccacctcccactgagggaccccgaatgagtcctcaaactgcctagaactcctattcctgtaacatacagacagtgacgaccacctggcagggctgccaaggggccgggagagatgtgtgcccgctatgtggcttcagctacaccaataaccagcctcacggaggccccggagccccggatgctcagcacggggtccccaacaccattggtaaatgactagctgagcattaaacaaggccggtggggggcaagggtcctggcatcctgcgggcggctcctggggactggctggtgctgggctgtgaatgttttggggtgctcagaaatattccaggcacatcacagagagaggtgctccctgatcccaggcctgccagcacgtgccgagtgcagtgggtcacagagacaagcatgagctcattaggaacttggggagcaggctcaccgctgtaggctggggccacccaccaggccgccatggcaggtatgttggaagatgagcatcagagaccgtttaagagaaaacactcccagcgtcccttatatgggaggaaatgcaggtgctgaagagtgaaccgtcgtgggagtgggtgagatggcgccccctccttctccacctccttccagtgcagctacagaggacctgaaggctctcatggacaaagatgggccagaaatcgggggtcggtggcaagcaagggctgcccccaggaggcacctatgagatggaggccactgggctcggcacccctgggtgagggagccgtagaggagcctgctcctctaagccctgtcctctgaggggcgtggagaggcccggcactgccctgtgggtctctgacaggtggccgtcccctggcatctgtgggaaggaagggccctgccctcccctgaggcctttggtcttcctccctggctggagaggtggggaccagagtagagcttgccccctgcccgctctgtgacgtggccccagtgcccactctctgggaaggaggtagatggatgcctgtagcagcaacgccacatcacagacccgttcgctcttcataaaacgcagagtgactttcggctgctttagctcctgtctttaggtcctctactgggtcctctcttccagtgggtggctgagccgcttccccatccttggccgtgggtggtggcctgggacatggatgggtctttaggacatgatggctggggtgtggggcaggtgagctgctctctatggagcccctgcagaacctccacgccctgccctcagtggacggggcctctgctggggcctcctgaggcatcccacaggcctggagaagcgagctccaggcacggcccatggtcctcccaagcacccccagttcccgaggggcatttgacgctgccgcctggagccccccatgtaacccgtttgcccagggaggagctttccccgagtgaggttcccgtgaggaagatagatacacccacacacgccctatagggctggtgggtcctgtggggtggaatgtggggcaggaggacctgggctgactcagcacagctggatccagctgtggggccatgagagtggaaggtgagagataaatgtggcctggaaagggaggtgccacaagtacccacgacggctgtgccgaagcccccggggaggagcttgttcaaggtgacgggtggcacttggtcatgtgggtgctggctgacattctgcccgggaggcctggaggagggggcattggagggggtgggtgtccggctgaggacaggggctgctccctaatgggggatgccctcggcgggagtggatgctgctgggccccaggtatgtccccatctcgcccggctggcacaccaggatgccgtgggaagcctcctcgctgtgccccttcggtctggggaacagagactgtgccacgatgagctcagctctcctcctgctcctcctccctctggccccagcggacgagcaaacactcttcccgagagatagtggctcccatccaacgcacctcagctaatcaccagccatcgtgggaaaagcctgagatgagggccgcgaggcagtgcattgtctaggggagattaaagccccagggccgtattgtctggccaggggataaatcttcgcgctgtcactcaggcactgaattaaattccccctcgttttctaaaggggcttatctgtcctgaatgggcagccgcaccaccagcgtgagcggacgtcccagcacctttgggacaggctgggggagcggcggccatcggggaaggggacacggggcctggagaggccacagaatcctggcacaggagggcaggcttggcctgagctctgtctgtctgcttccttgacactgtgcaaggaggagccagggcacccgtgggggtctctgctccgggccaggcagagccggaagccaccaagtgagggaacagaacttggcaaggtcagaggaccagccaggggtggggaaaaatggcatatgtcctcagggcagcttgaggctgagaaggaatgccggcccagctcagcaggagtgatctggagctttctatgtatggtgacatccgtgttagggcaagactgggaagaccacccgttcttgtctcccccacccggagacccccagtcccagctggagctagtgctagagtcctgggctggggcacagtctttgctgtctgggggccagccgaaaagcacagcccctccaaggaaggagagttcacacgggtggtttttcaacattctcagcaacaggactcctttctaaccccaaccttgtgtggggtcctgatttacaaaaccaaggaaggcagagttggggaggatgccccggccacagctaagtctcaggctgaacagcctcattcaatgctcccaggagccccatttcgcagtggagaacccagagctcagagagggtgggcagtgagtccagccgcacagggagccaggtagaggtggcgccaccacccaggcctccccagcggggctgggaggggactcaggggagggaggacctgccagcacctggctacctcctagctgtcccctctggtttccctggggcttcttggctcaggccagactcctacagcagtcttccaggatggagtcctggaataaaagctgtcatgggaagccacctctggggtcctcatgggctggggcccactggtgggatcttagctgagagtttcagctatgaatcctcaaaaccgcatccccatccctgagctgcaggtgggccccctctggcatcccggcctagacaggacggctggatctgaagtgtcctgcatttccatctctgggcatttggggaagtgctcatggggttttctgcactgtgcatggagtttgccctcggagacaggctttaatatgcttttatggccctttctggctttgcagttatctccagctgctcctctgaaggaccaaaaccattgcctgaacaaggagacctgtacctgttaccagattctcagtgagcaaaacagcctgcccactggggcccctgcggaagggactctggaagggctgggaccatctgcttcctaccccatatgtggctgctctccttcctgctccagagcagatgctcaggtgggaggtggccctgctgctctggaggtcagagtagcccaacctcagggtcacctgacagccccggtgatgtgagtctgaatgtatcatttccttcaaatcttcctctccctaaaactagaagatgtgatcctgtgtgcacagaggcgttcacaggaactcaggttcctcccagtctggggtgcaaatacgttcaatgggtcctcctctactactgctggacctggggccaccgcagcagcaaagtcaggagagatgggcagctccatctccgaccaccacgcctgtcctggtgagctggggcggctgtaaccaagtacctcggaccacagactgggcagcttagacagcaggagtttgttttttcaaaacaaagggtccccgtggtgctgtttgctcctgaggcccctcttgggccctgtcttctgcctgtgtcttcacatggtcatccctttgcatctgcatcctcatcttctaagggcacccgtcctattggattagggcccgtcctaatgacctccctttaccttagtcgtctctttagagaccctctcgccaaacgcattctgagctcctggggttagggcttcgcctgtgaatttgaggggacccagtgcccttcctcgaaatgtcgtgttgactggcagtggctctttgttccgggtctctgagcatgactgttagtgataacctcgcataccgccaaaaacaccagcccctgaggggtggtgcagaaacacctgtggagggtgcccaggccattgggcatcgccttaagcaggtgtgcagggcaggaggggacgagagttctgtaactggcatgcacgcaccattctgagaagccgcatgagcttaaagagaggcctcaaacctgagaggcgtccctggaaaccagggctgctctggagtgcacaatttttcccatttttgtggggttgagccttttcaataagatttcaagagaataaaatccacaggccccagggaatttgcatacggctacttaacatcaattctgtatgttttttaaaaaataaagaaataaacacatccacaaacttccccatccacagggcgggactaccctgggagttaacggttcaaacctatacaattttttaaaacccagcagctttccataacaaagggcaaaattcacaaacaaattgccttcctccgccgaagtcactgctccttggccgggtaaaggcatgttgataacacacagctccttgggccaccactgaatggcggattcccatggagacagggtcccccgaggtctgatgagaacagcatggctcaggagcctgcatgcttgctccctgcttccagccttttcagaactccagctcccaggcggcactgtggggacccaggaggcggcctcccagagggaagtcagggctaagcagaggcagcccaagacctgctgtccttgctggaaggtgctagaaggagctgggaggggtggggttggaaggtgctggtgggagctgggaggggctggaaggcaagcgcctccgtgcacagggccttgctgttctagaagctccagtgaacaggcagaggctgcccggggagggacagtgctagagaggacagggtgctgagtcagcgggcatctccagtgggcgggagaccacagcagttgtctgccccagtgttcacaagggtgggcgccgcagccagccctcaagaagccctcagtccagcctggctggccccgcctacacatccaggagcatgtgccagcggccctctccccagaccccttctgcccccttcattcagagctgcagccactttgtcaccctggcaggcccctctgggctacaaacccctagtgaagtcttccttggagcccccacctccccacgtcacctggccctcgctgtgcattcctgggccgtggccaccccgcccacagacatggaccctgaagggcagggatgcttctgctcctcccagctcctggcagcatctggtacccagtggccacttcatgaacgctcactgaacacatgcatgagaggtgaacacccacccggaggtagggtggcctccaaggacagggctcttgcagggtgagtccctcagtgcatgggaggaggcaggatggactgttctggagcaggtgtcatgggaggatctgctgtcctctctggaaggtgctggagaggagcggggggtgggggcgggtggaaggtgctggaagaagctgtcaggagtgcctgggcaggaggagaagcagggccatccccccaagtagtgagccctccccacgatggccacaggctcctcactggggagcaggagcttccactgcctgcctggtgtcctgagggcttagacctggaggtaccactgtcctgcccaccagcctccctgggcccaaacttgagggcccagcccggcctggtcacagctctgacaccccgcttcctccaggcacctggcccagagcagaggcttcggtctgcactgcagcaccctgtgggtccagagatggaaggcgctgtgcatgggcgcatggtctggtcagggccctctctgggccaggggctggtcagcaggctcttccggagcgcagccttgcacctgaggcctgggcctggctgcaggaaagggaacccttggacggtcaccggtctggaccccaaagggttaaggagcaagtgtgcactttgttcccggcatcccctcagatgtgagcctagcgctgtccccaatcccttcctcatgactgtgattagtattgcgggatgaataggccagcgcagattcctatggtaaccttcaaaatgcattcctcgggcaggctctgcctcccgcagtaattacattcctaactcggcccacaagcagcatgctaattagcgctccgctggcctcgcctcccgccctgagaacggggctagcagaggccactgctgtgtgcagccccttccccctgcggcgccccagacaggacaggaaacaggcgagaggccagggcagctaggccaggccggccacagagagtcttcagggaggagcagcccaaagcccctctgccacggccatccttagtgtgccccggggtccacctgtgctccttagttgggtgggggcaggacatgtcctgaaagctctgccctgtcctccagccccagcttcctgttgaagcttcctgggtgcagggctcagggctgagaagggggcaggctggggcccgtctcaccctcggcctcaaaggatgccagcccagctccccacctagcacatgtggatggagtcctggcagggtgggcggggtatggggggaagcccctgggggagcctgtcttccaaagagagcagccctggtgagcaggtggccaggtctgcagagaacacctggcaggcagttctttggatgcgatgggggtgtccaacctggaagctgaaggagagacacaggctaggagggaggggagctccctgggcagaggggccggggcactgggcctgaggctgttgagagcctggtgcttctgaggaggactgggtggtggccccactggggcccgagggggctggagggccagaagcggctcaggggcccgagggctggtgcgagatggatagctttgcctggctcacacacagcgggtacctgagcagaggcagggatggggatcctgccagggctgggggagtggtcacagggcaaaggctggacaaggtggggcttggggagttgtggtgtgggtgcgctgggtggcagagctggcaggaactggcaatgaattacacatggggtttgggaaagggaaggcacccccaggtttctgtcccaagcacctgggccagtggaggcatttggccaggccagcatgggggggagcagctcccggcgggctgcctgagggtccactggtatcagcgaggcagtgctggccattgctgggctggcattggaaggtaagggcagagggctgtgcccatagggctgatagtgctggccctgtcactgaatagtgggcacctgttctctagtgggcaggtgtggctccatgacaacagcgcctggggccaacagagccctgccacccagacgaccagaaggagagggggccagcctttctctcccctgccccaccagaggccaggatggcagcatggccagggggcaggccctagggccaggtgtcatgggcttaagcctggcaagagcagctcacacctcatcagggtggggccagtaggtgccccaggaattttggtgtctgctgctgccatggcctcagggaaggaagccgagggcccaggaagcagggctgccatttcccagggtcaagtgtctccaagagcaaagctgctcaccttgaacctcaccctgcctatgtccccaccctgttggtcttgggggaccagtctggtggattccagaaggctgtggctacagctaggctttcgggcttgggcaaagagctgggagcaggtggttccacagtgctggctgggccgggggagccattgattttgtgcccaggtggtttacagtgtgaagcttagggagggattaccgggctcgggatttggaagccagcagttccttggtgtcagtctgcacaactaattctaatgtaaatagagcaatcctttaagtatatatcatttaatgcccgatggggagcctgcggatctccttaccgccatcctcatctcagagtagctgctggttaacttctctgtctcagcccatttctctgatggcgggtgtttgtggtaaaccccgtgaaggtgtcacaatcatcatggaaggcatcctggatggatttctgttcccttttgtcctcctcactggaccagtgactcgaaaccacctttccttgtaagagacacacactatccctgggaactctgctagccaaaccccagctgcctcctggttgtgctggctgtggcccctggcctcactctctccctgccctgggccttgctcaagccactactggccaagctctgggcctcaatgaccatgccatgtgtctagcctggggctgggctttcctgggaggtcctaaggtaaatgctgtgcaacccctgccggggaggggggctgaattgtcagggaatagcaaggcagcactggcactgccacagtggctggtgtcagggagttcacctccacaccaggccatgccaaactgattcctttctccagacaaaccttgagttgggagctcttattatctcagttccacagcctgggagatgcagctgcagcacacagagtgtgaaatcttacattcgtaggactgggagagcatgtctagcaaggggccattggtcttgccgtttgtccttagagctttgcttcctttaaaaataaacccttccctattcccaatccaaattatcctgtaattcttttttgaagttttactttccatcatgaagtccttcaacccaccaatggtgaatttttatgtatggtgtgaggtagggatctaacttttctttcatgcagctggtgggtaagctccatcccagcctggtctatgtaggggaagtattcacctctgggatttaaaatgttaccaagtaacctgcaaaatcacctctgtgacagtcaaagttttgtcccagtgagggtctgtctctcagtttctcatctctttcttcccaatcatcagttggtttatgcctggcaatgctacagtgcctgacacagctattggagtaatcgccatatgctagggacaggcaccctgccaggtgctgtcctctgcttttggaggggtggaggaaaccaaggcacagagagatggtgcctctgggcagctgctccaggtcaaagcactgtcaagaaggccgagtggccctgagatgggagctggtgccagatgtctgttcccttcctgtcctgccaggaggggtccatttgagcaggaccttcagaggcagtgcccccttagtgctcaggatgccaacagattgtcccaaaaggtgctggcaaatttttaaaataatgtgaaacagcctgaccaacatgatgaaaccctgtctctactaaaaaaaaaaaaatacaaaaatacaaaaattagctgggcgtagtggtggacacttataatcccagctactcaggaggctgaggtatgagaattgcttgaacctgggaggtggaggttgcagtgagccaagattgcaccactgcactccagcctgggtgacagaggaagactccatctcaaaataataataataataataataataataataatgtcaaacaaaatcacatattttgaaaaacaggtgtgtcccatgcagcaccctaaaaaggctggggtgttttaccttctttctgtgtcacaggtttttgtcgccttggggctaagtgtgctgatccggtccacgttttgcaggtgggtgggctgccaccagctccttcgactggaccaaatgccgtggattctagcttgtattcagtattattatcattatgattactttaccattcaccaaggggcagcaccatcctggggaggcagctgcatcctcatccgtggagcccgcaggatgcaggctgaggctctctctcctcctgcagatgttcagactagctccctaaacagacgctaaagtgattcctccccacagatctcagaagtcaactgccctttaataactgtctaatactaaacgctcctgggaggccctagtgaagcatcacagaccattagaccggggcttccgccgaggactaattgagcagcccttagggcttttcatctgggcaagaatccgaactcctccaggaaagcatcaagtccatcccggggagtgtggcaggggaatttccatcccgtctgtgtgcttgagcaaaggacatgaaagcaaacgagtatgggagttattacggggtctcaaagccaaatttccccccaaatatcacctgagtggcccatggagagaatggatgagtggccggtgtgtttttcaggggaagctcatttgtgttggatatgggctcagctggcatcacctctttccagacacagacacagacagcagctcctccatgtcctgcgtgtggggacacagtgctcgggggctcccctatgtcctgggtgtggggacacagtgtctgtgcctcccccgtgtcctggatgtggggacacagtgtctgcggctcccccatgtcctgggtatggggacacagtgctcgggggctcccctctgtcctgggtgtggggacacagtggctgtggctcccccatgtcctgggtgtggggacacagtgtctgcggctcccccatgtcctgggtgtggggacacagtgtctgtggatcccccatgtcctgggtatggggacacagtgctcgggggctcccctctgtcctgggtgtggggacacagtggctgtggctcccctatgtcctgggtgtggggacacagtgtctgcggctcccccatgtcctgggtgtggggacacagtgctcgggggctcccccatgtcctgggtgtggggacacagtgtctgcggctcccccatgtcctgggtgtggggacacagtgtctgaggctcccccatgtcctgggtgtgcagacacagtgctcaggggctcccccatgtcctgggtgtggggacacagtgtctgaggctcccccatgtcctgggtgtgcagacacagtgctcaggggctcccccatgtcctgggtgtggggacacagtgtctgtggctcccccatgtcctggggaacgtattttagtgattgaagttggacctaacgtgggtgttttctcaagtattcatgcaaatcattatctaaagagagaatgtatttctgttaggatgtcaagatcagcttggtgtgaactttccttctcctcacgtggcatctctgagttgtgggcttcctgtggtcctggagagaatgttccggctcagcctctctttaacaggagcgtgggagggatggaggccacgtgtgaggggcacatgcttggggccgggatgaggtgcagctcttgggataagaacagttgccgagtccttgccgcctgatgccccggggtggggtgggggatgggtctaaatcgaaggaggccagagattgcccggttctgggcaagacggcaggggagccattgccagcctagcttcgtgggctggtgaggatgtggcaccgatgtattgaggaatccctgggccccacacctgccgagtgtgagatggggaagctggaggtgggaggctccacgctggctcacgtgcaggggcccagggattcccagggcaggcccctaggaccctgtccacacctggccttgggccctgctggccactgctgggcccctgtgcccacgtcacagcctgcctgtgccaaggcccctgggagacgcggagagaagggaaagaggcttgtcctcggccacggccttagtggggtgcgggcagcaccggcctctgtgtgatcctgcactgggcagtgggggaggcaggatggacaagagtctccctcctgaaggtggtgctggggggaagtccacacatggaggcaggattcttgtcaaggggtggaaagccaggccaggcacctgtgtggacccagtgccacgcggactcctgtggggaggaggacaggcaaggaggcctcgaagagggaagaccagagaaggaggggaaggggagagcggagggaaagaggtgggataaggaagagaaggaggaggaaggggaagagggaggagggtgccgagcaaggttgggggagcccagcgcacggaaaggaggcgcaggtcaggggcgcacgccccctggggcgggggcgcaggccggctttcaggtaccggccttttgtctgctgccttgggctcgcctgtcagccccgctgtcagaggcctaatctttttttcttcgcggctgaaaaggcccagcgccacatcaggcgacacacggctgcctattctccttccccgcagaacccaatcactggacagcgccacgataattcactccccagcccgccctttgaaaaggtgggccgcctctgcgccgctccccagcaagataaatcatgtactcgaaattaacttccattgagagggagggcaggaagaaaggctgatgggccggcgcggcggcgagggaggaccggccttgataaatgtcagtgcggataattggggggctgtgattaagatcttatctaggtgggaagtaaacagaaaagactttaataaaactcctgccccatccacgctcactaacttgagaagttcctttcccccccttatttttgggggtgaattcagaagagaataccaaaaaggtcttagcgaaggaaaagttggtttcagggcatcacttaaaaggattaaacggacctcggaggagcctcggcgtttcacccgtggtgacaaaaggcagaggaaacagaagggagcacggctttgtccccaaattcccacttatacgaaatgatgaaatttcagggctgagcatccatcgtgggccccgggaaccggcctctcagcctctcttttcgcttctctctagtcataagcattatcttggtctgtaaacattcttttttcaagtaagaggagccccgcgcttgcacagcctggggtgcgggaggcagtttgcacgggaaggctctgtgttcccgggccggcttcgccccagggccccgctcagtggccttcgcctggggattgatgtttgctgccctgactccagcagcctgcagctccaacccacgctgctggtggagggagcgtctgtggagcctgtcctccatcgctggtgccctggccgggccgcattcctgcagacagggccttcccacttgcgtggaccaccccctgcagccgggcagctgctccccggtgagggtttctgccagctaagggcatagtcacccttgcattggcaaatccgtctgaggtctgcactcccctaattggagtcgctcagggaggcaaaggggtgggcagccccgagggcccgcctgggctccagccccatcatcctcctgtggaacggggtcccgggccatccttcttgcggggagagcctgtgggaactcactgaggtcacatgtgcaaagggctcagctggcagttacaaggactggggtgtgctccctgtgccatgcaagtcttcccagactggtgcagggcctgccatggggcacccagagccccagctagaagcagacccagggaacagccagcctctgtgatactggggggcctcttgtggagggggctgtggcctgtgtggctccagcagatctgagatattactgggccacagggactccacggagggggctggacacccgtgctgtgcacactgcaatgttctcccccaagctctggtcagcccgtctgcggtggcctggctgtgggccactggagggagcatcaggtgcaggggagtgggaggggaagcaggacaggggcccggaggagacaggacggctaggggattgtgaccctggaacacagtggctccttcactgcaggtcccagcccgagtgtgactcagtcctcagctgggcaggggagggcgtggggatgcccaggacctgcacttactaggtgcttagcaaaggtgcctagagaggaaggctcggaggaaggagggagggagggaggggaggggacgagacagacccattatgaccaaggccgaggcctgagccagcgggaggggcctgcgtccatggctggccttggcgtcactgacactttgctccgaataatcccttgtcttgctggtcgtcctgggcactgcagggcgctgagcagcattcccggcccccacccaccagaccagggtggctccccctcagagctgaccaccaaacacatccccagacatggccgcgtgccccagggcagaacccccgtctgggggccctgggccagaggcagaggctgcatcctggcagggaggcccagactccctcgaaggtgcccctgtgtctgcctccctcaggccggctctgggctcagaagctctggaatcgaaggagttagatgctttcccttgagaatattttctgtttcattttgagggagaatttttttcttttttttctctcccactcgggatgtgaaggacaaacactggagtggttcctctgttttctttggttttgtttttaaacctactagtcatgtgcggaggagtttcagggacaaagttgccaagttttgaagtgtagatttgtatttgcatgttcatttgtgatggcgccgtgctgcagtaagacagcggcgtgtatctctgcacactgcacacacgcacacacacacgcacacacacgcacacacacgcacacacgcacacgcacgcacacacgcacacgaacacacacgcacacacgcagtgtaaacatgcacacgcacgcgcacacgtacacacacgcacacacgcagtggaaacgcacacgcacgcacacacacgcacacacgcagtgtaaacagacgcgcacgcatgcacacatgcacacacgcacacacgcaggtgtaaacagacgcgcacgcacgcgcacacacacgcacacacatgcacacaccaggtgtaaacagacgcacacgcacacacacgcacacacgcagtgtaaacagacacgcacgcacgcacacacgcgcatgcacacacacatgaacacacgcacacatgcacacatgaacacacacacgtgcacaaacaagcacacacttgcacacacaagaacacacgtgcacatgcacacacgtgcatacacacatgaacacacacatatgtgcaagcacacacacgtgcacacacaaacacacatgcacacatgcacccgggtgcacacacacacagagggaaggcaccctcctgcagccgggtagatggtggggtgcaggcccctgacggggagctcctgcgcttcaccaaacagccaccactcccagccctgcccagaccatcccaggtcagccctgcaattgatctccagagtcccagatgttgtgggaaggggaggaagaggccctggccgggatgcaggattcgcactcagccctcagggtgaggagaggcgcctccctgcacacttggccaaggcctccttctcctctgacctcgcccctgggcccaccccacccctggctggtgacatctgggtgtagcctctggagtctggtgcacagagtgacacatttggttttcagccacagtgtgggcctggccagcctctgagcctgagtgctgcagccttctgtgccctgccccgctcctcccacatcatcacattcctcggtgagtggttgggggggcactcgctattggatggcacccatcaccctgtgaccccgcctctcctgggtcccccacacattggagttcatgagaccctcatgtgaaggcttcagaccccagccagccccagctgtcccatcagtgggggcagaggggctgtgagaatgtggtggccccatcagcgcccgtcagaaagggagtgcagggggcctggaaagtggcagagagagcaaatacgccagctcctgagcaaacccagcgggacggggagatgacaaatgatgggattgtgtcagcttgagagagattggactaatggcacgcggactttgcactctgaggatcaatattccatcaggcagtggagcgccagcctagcgagtggcgtttatgtggacaaaggcgagatccccccatagtctgtgcacactgccccggcgccggcctccgccgtaagcctgagtgaagccgagagggggcgggggccacggagggtcttggcatcccctgagtgatgggggcaaaggccgggctgaccgggggctgccgctggcctgggcgtctagcccttggcctgcagtcctgccttccacacggcatctcctatggctacaggttggcatcctcggggtgccctcgggccgctggtgcccaatgccaggtgctgtcttcccaaaagctgtttctgttctacctggctctgcccacctcttctcttctctggcccatgctttgaagtctcgggtgtcaggaggccagcactgcagcctcccaccctgtgtccagcatctggggggctgctatctaggctgtccatgccccagcctcccgggaggactcccaggcggcccctcccagcgtctgcagctccccagggggcggggctcgatggcaggtgctaaacgcaggcaggtgtggccagccggagcccctcacacggcaggcgtcaggttgagtccttggggttcagggaggtcaaggtcaggcctagcgtgggtggtcatctcaggggcagcactggtggccgttgaattgttccttaccggggagaacaggtggcagggagggatggttccagaccccatggcacccgtgtctctgcagtgtgtccctctcatggggggacagtaggcagagctccccggctgccctgcgccggcgtgctcactccgcggtgcgtgcttaatacccacagtgtgagaaccgagagccagggccaatgacgggggggacgcgggttcacgggtggcctggagacgtggcaccgtacctccctgctcccttcctgtgagaattttgccctcaagatggcagcccagcctggatgcccagaccccattcccaagccgcaggtcctggtctgggctctgtcactcggggacgcgcctgcttgtctttccccggctggggcagtgcctggtctgctcagcccttcctctctccccgcccgggacagaggctgccccaggggaccgcagctccggctctgatggcagacacggtgtggcctgtcactgcgggtctatgcccgagctctggccagacgatggtcaggctgacctcagaggtcagaagccacttctggccacacccttgctcttgcagccctgaagccctcaccccagcaggcctagctgctccatggctctggccccgctggtgacttggtggagggcttggagctccgtgtgcccccacctgcctccagtcaggccctccacaaacccccgtgactgggcactccttgcagcacagcctggtcacagcccaagcccgacctccctccctccacggcactcacacctggggtggatcaggacttctggtccatatccctcctggaagtatagaaagtgagtctgaattctggccctgaaagtggggtgacaggtgggcacagctgcccccaggacccacgggaagggctagagcaaggggctcctatcgggggctgcttcctcggtgggaggagcccctcctgcgtgctcttctgctccggctgtttcggctcccatcagccgggatcattcatctctggtttcttgtctcacaccggcctctatgagagcgtccccaggctgacccaggcttacaggcattttaaatacaaacatggcaagtggggaccgggagtgctggccccagcatcctggtggtcatggccctggccttcctcaggagtcggaaattggattagaccgtgcagggatggggccaattggaaccaggggttcggagggtctctgcagaggtggctgggagctggcgggtgagaacgcagggggaaggaacaccctttctgccccagagagcctgtgaggtgcatgtctggggagtggtctagagcctgggggcatcgccatgccacctcacctctggctaccacgcaggcctcgcctatgctgtccccacccccggtttccttctgcttgatttgccaagttgtccagagcagaaaaggactctgcctccccagggcccatctccagggtgaggagcagagccaggccctacttctggagggggcccggcaacccagcctagtccaggcccaggtcccgtctggcctcctgttgaccgctgggctgagccacaggcccgggcccgccttgtccttgtgctccagcgatcaggtgctggctctccatgggaccacagaccccagggctcgctggtcttggggagaggcctccgcacattcatgtttccacttggaatgcaggacaaaggctccaggtggtgccacagattcaccggctacaagaggcagggcttcctggtgccggaaatccatgcaagttgtgcacgtgtgtgtgcatgcatgctcatgctgtgtgtgtgtacatgcacgcgtgtgtgcgtgtgcgtgtgtgcatgtgtacatgcatgtgtgtgtgcatgctcatgctgtgtgtgtacatgcatgtgtgtgtgcgtgcatgtgtatgtgtgtacatgcatgtgtgtgtgcgtgtgcgtgtgtgcgtgtgtacatgcatgtgtgtgcatgctcatgctgtgtgtgtttggaaagattgtgtgtgcatgcatgtacacacgcacacacgcacacacacacgtgcacacacgtgcatacacacgcacagagctatccccagaaggctgatccagacctgctcagagtgcagaaaatggagccatccagaaggaaacagcatggagccctggtggcctggatggcaattcacactcctgcacccccacctggcccctcggaagcgtgacagccatggagaggggctcctgggtgtgcctggacactccctacccaggacctaagctggcaagggggcagctttgggagctagaagtggttggattccgggtagtgtggccaggggccttccccggcatgatggcatccgcccccagctcatggcccaggtctccatgaagatgaacaaaacaccaccaggagagggggaggcaaagccgggaaagaaccagggagtctgtgtggctttcaccacatgctcaggtgctctgtggcatatgaccatgtctccaggactggcagtcggggggtgtcagggacccccagagcggacttgatctcagcctgggggccacgtggatggagtccagggagaccccagctgctggcgtgctagggcgtgcgtgtacacgtttgtgtgcaagtgtgtgtgcacgtgcatgcgctgtgtgtgcacttgcaggtgtttggacacagggcccgaggcacctctgtgcccaagtgggactgaagactcccatcaaagaaaggcctgggagagccccctgcccgaccttctaaggcattttggcaagaaaacaccctggctgaggagcgagaccctggcccacagggttgcttgaccccagagcaggcagggtgggtcctccctgtagagctgggggtggcccgggaggtgggagacggtatggccatctctgtaccctgtgccctccttcaggccaagggcctttttggtgggactggctggcctagtgacttccagctgcacagctatcgacccagggctggacagcccctgcctggcagagcctggccatttgctttcaggagcaccccaccccggcggccacagtgggacttcctttccaggtgctggtgaagggccggtgcctcggccggtgccgtggacattctttgtgcggccaggcgggtgacccgctgcaggcttggccctctggggtctggttaattacctttctccagacactggcgtggaaagtcatttccttgagaggatgcggggaggaggactccccatccagccctggcctccacagccgcctgggccaggttgggggacatgggggctgagttttctagtgtggccttgggtcactccaaagcctcacccccagggatggggacttgggtgctgtcccgtgcctggcatccagggcagggggtgatgttgtgtgttttctctctgaatcaggctgctgatcgtgacctggctggggagggggttctagaagcctggccatggcccgatgaggcagataggaaatcaagggccaaggcctcggaaagtgggagagtggctgggggtgccgtgttttgtacaaagagatttttatgactgatcctttttcttcacgtaagcggtggagttaagtgtttggaattgctgcagacgctgagaaaggcctgcccctgtcacgccggattgtcccctgctcagcagctgacacagcccatctgcagtgtgcgggggagagggaagcctgcagaggggcagcccccaggatccctgcggccccacagccccttccctgcctggaggctgtttcttggaggggggagagaggaagcagcacccaggctgcagccctgcctgcctgccctagcttgggagccccgcctggtggccgaggctgctggtgcctccttgctcaggggcaggtggaagtggtcagtctgcccaccaccagcccttatcccacaggtggcccctgagcttccgtgggggatggcagggtcagccctcaccgtcggcagagttatcagttcgcagcttgaaatccaagtaattaaggcgatggattaaatctgtgggaagtctccacactggcccatatcacatcgttccacaaagatcgcgtgtcctccctgccccctgtctggcagcctcccctcccggggcactggaagattccagggacgtgtctggtacgcttcagcctggttgaggtcgtcaccgcagaagggagttttggggtttggcccaaggcccggtgacaaacaggagctgcagagtggctgggaggacgggaggggctttgctcctgaactcgggggtcgtcacacacaaaaagaccacttcaagtgtgcaccaggtcatttctttttagctaccccagagtgtctgccaccatccccgcaaagctggagaaagagaaacccaggcagccagaaaggaactcgggagacccccacccctctgtccctgcccctgtccccggcagccccctgggagcgggaggatgcctgcccttgcgtctctgcgctggagcttctgacacctttcgcagtgaaaggcagggtggatagtcggtgaggagagggtctggaagcggtgggcctcgtgggagtgaccccagccaggcagagtctggggacccggatggcagggccgagccctggccaagagtgcaaggaggctgccggccccagaaagaaccattagaagcccctttccgcttctgcagggatttgcagagacttgttctctccgggatctgccattccaggggctcctcaccttcaggagctgtgtctgaatgtctgagggaccttcacatgtttgggtttggattggaaacaggatatgattgacttgtgagcatgttagaatcttgtgctgggacaaggtgagcgtgtggtttctccccctttctttctgtcgtgtaggaaaatgctttagttagggcccggcttggaggcagggctgaggagtcagcggaggctgaggccagaggacagcttgcccgtcacggagcccgcaggtcacaggatcaggcctggcccccgagctgcgtaagatcagctggcctggtcaggacggagcctgccccaggagcccaccctcccagcaggacccggggctgcggtgcctccggtcctagcaatctgcccctgaaaatggccctggtttgggggcagggcacaaacgggagaatgacattatttgtttttaaaaacagcttttattttaaaagcctgtcctggaggaaagcaacctggagctgttttcaggaccgggctcagaaaagatcagctcctgatgaaaacaaaacacagtgaggacaagccaggtagcccagaggcccccagctggagcaaaccgtttctgtggagactccgaacgtcgcctgcctcctgcaaggccgctagtgtctcccggcctgggcctggcctggaagtgcggggcaaagggcggtggtgagaaatgaatgggcttccgaatgccgagaaacagatgtgaggctgtgccgaggaaggggaggacagggaaccagctgattaggggatccggggcagggccaagtgccgccgacagccttgggggacagcggccctccacctcggctgcgcgctgcaggcccttctctgcggggccggccaggcctccctcctgccagcaccccctccccaggcggctggggaccccggaatgtgtggccctggcgggaagtggaggaagaagggctgcagccccgtcagtaccctgggtgatgtagtgagtgaaacatcttgaaaaaggaaagcaaatcccgctctaatctccccgaacaaaggcctttcagttggaccagagtggcaggcgcgggcggttggtatcgccagatcttttctatgaaacgcgcacccggcggagtatggatctgattaggggagccagcctcaccgcgagcccctttcctgcgcacggtgtctgtggaggtcaggcggacacgtccagccatggcctggacacagacagccgggctgtgtggcacaggactgcctgctggaagcttccgcctgcgcactcctcccggcctcccgtgcagtgctgggaaaaaccgagtgccccttctaacaatttctaatcgacccttgagatgctgggccctcgacgctctctgcagatcccctcctctgtccggttgctgctctgtcatgtccctcaaacattcaaacacagctcctgggggtgaggagcccccggaatggcagatcccggaaacagcaagtctctgcaaatcccatcagaggctttgagtctgtcacaaacctgaagcaatgtctcttcaaagctctgtcccagaagcaaatggaccccttgaaggtggccggcctcccctggggcccacctgggggctgcgagtggccgcgtggagaagtttaagccttcagcagaacaaacaaaactcaagtgcccgcaagaggaagaaaggatcattatacgagtggaaaaaatgaaccgtctcgactcagcaaataccgcagccctgccctccttccagacattccccccctccgtgctgcccccacactaaaaacagcccaggaaaggaaatcaaatttagggtttcactaactggccagaatgcttaatttaataaggggtgggagatgctgttgtattttattttattttatttctactttgaacaggttgaatcttcctgtagggctctagggaggcggcggctgggaatgagaaccagccccagctttgcaaattcaaaccaggactggagcgcgggaagggcaagaggcggagcgcttgcacgggagcccgaggcctgggggacggctcagggggtcttggtgctcagggcagcggtgtgcaaggggccaaggtgggtgggaagaaacctccttgatttcaccaggtcctggatgagaagtcagtgttcttcggtgtaaagtgaagagcccgagggctggatgcgtggttgctgtgtcggctgtgtgcttgcacctcatacatgggacagcaggcccaagccttcggcgctcccctcttctgccatcatggcaaagccaaacccttgcacaggggacaggggctgcaggatgccttggtatcaggttcccaggaacgtgtctgtctccatggcagagaggccctcaggaaagccgacaggaccctaacaggtgacagtcctgggctgaggggttcaaagcaatgtatctccaggcgtctgacaaatttatcaacccccaagtgtggcacccgtgcagaggggggtgtgggtggctgagatcaatgcccaggcacgggtgaagggtgtctgccagcagctatgtggagcctgcggccttcctggaggagggggcagccattcggctacataaacacctgccccacctggttcaccctttcagcacagattgcagagtcccactccccagtgaggggggcccagagtcttctccagtgcagcaggtgctgctggaactgggagggggggcagcccatcccatgcccccttccttggcatccaaaggccaagctggcgtgaagctggactcaggagatgcggctgtgagggtggcaacatctttttcttctcatttgcctcccggtggcccgagaagcagggtgctcacggggtgccccagggcattgccccagtggcgagacatcaagtccgagctccgagtggatgagctgcggggtctggggcaaggcagttggcctctcctcaactggggacaagacagagacttgtgtccttgtcaaggttaaatgaggccctgtctccgagcacctgggctcgggtggggcagctcagctgcagtcagcgtcccagatgcgcaccccacgccgtatggtgggcgtccgagtcgtctccttctcccaggctttgtgtggaatgacttctctctctgacgctgcctttgggaccccatgttagatgtgcccccacccgtgagaacccccaagaactgctgggacccgggtgcttaggagggcagggccggtggaggtggacagggccgtggagctggccacagtggctcctggagtcctgggggtcctgtcctcgtaccctggctcagcccagcctgggccctgagctggaggccggcagtggggacaagacttagatgttaattttaaaatgaaaagggaaaggccaaggaaaagagggagagagaggcccagacagtctcctgttttgcagagagctcttctgaactctgactggtttccctgagtggttcttggcctggctgggctgacctatgtctttcagccaggaacctctgctcccgtggcctctaaacatgacccactgtccaggaactgatcatggacaggacagaggtgacagccccagcttggccttttggaaggcagcgatgcttaccactatagcaccaatgctaggatcagcttggtcctttggccaaccctgacccttccatttgggagagagccacctgccatgtcccaggcctggtgtgtggagccacatctgcggtcctgccaggccttggagcggaaggaagaatgagggccgggggtcaggtgtatctgggcttgcatccctactcagcctggtgacagcccctcgaagcccccctccacctaaggtgggccccagcaggatggggggacctctatgcccttggtggctgatgtgaggggtcagggtgggaacatgccagctccagggccaggcctcaatccacagccccctccctgctcccatccgggcagccctgtgggaagtaggctggagaaggggccccaggtctcaggggtactggaagcgagcagctgcagtgtggcccctgtgtgtcctgggttccagctcccgcaatgttcaggttcctgtcagctccgcaggagccccctggggctctctgggctctttgcatgtctctgggaaaacctgatcagctgacccaaaccaactacagttctggcgagtttctctttgcctaaagctctgacatttctgcctcgctaaggcacagtcaccagccaaaggctgaccatgtgcgcaccccgcagctgcacctccttgagaatgctgggcttcctcagccagcgcgcttcccgcatccgtgaatcactccggctgaggctgctttcttagcggacggcccagcccctgggctctgggctggagaggcctcagagctggccagaggaggccagcccagtgcccgctgattggatgggcaaagaggacggtcctcctgtcctttctggaagtgggcctctgttcagcccaggtctcctctgaccccccagagtagccactgtcatcgccagggcacatggggaaactgaggccccccactcagcggctgctgggctgttcggaagggcagagtcgccggctcagcgggacacacgctctgaagcacaggcctctggggggaccggccctgcctggcgctcgccaaggctctggaggagcaatgagttaggggagcggctgtgcaggtccctggaccgggctccgcttttaattttttaagggaagaaaggaaaacatccctcagtggctctcccaggagctcagccgtgtttgctgtcggtcacggcaggttgggccatttgtaacgagtttggtctgcgcggggggcactgaccccactacgcctggcccctcggagcggagcgcggcacaggcgaggcgcggccaagggtgcaggtccctgcactggcccgattcattaaggaccggctcctttgtgggccccagctccaggcccattgctgtcacggggctgttacaggcataatgacaggggcattagaggcccgagagcaattaacaggctgcttaattagcaagaggaattagcgtttgagtggcggatcttcctgtgaaaccttgtagagagcccgggcagttatctgattatgcattgatcgggctggctcgtccttaggtaatcctctccctcttgcaatctgtgaatatacaactgtttaaatattccaaaccgaactgtctcaataaacgcggggagaaaggggccattgtgggcccgggcgccgctggccgctcttcccggcccagctcccctgggcttgcagaggcacagtcggtccccgcagctctcgccgccgccgcacgcggccagcctggctgtgcctgggaacagtgtcggccagtctggccccaggccagccctggccacaggtgccaatggcatcctcctccccaggtctctcccatgcccccgggggctcagtccactgctcaggtggacagggcaaggccggaggagctggctgcaggtgcgcaggaagggacaggcctggctacctgcaggcagcacctggggtccagacagccctcaacgagggacagtcaggtcagatcaggtggacccagaccctgctgcggttcctggaatccctagatgagctttgaaaacccaggggcctgtacccaatcccaagcagtggcctaccgtgcttgagctctgtggtgggcagagggctggggactggaccaggagcctccagccctgggctctgtcagggaccctgccctgtagggctggtgcttctggagtgagggaggagtagacaggaaccagtcctggaggtgggctccccactgggcctgggacaatgaggtgcccatcgccagtgatggtcacagcacctcgaaaaggcagagacaggaagattccagaagggcttctgattctgtgcagaagcgttgtagatggggcatggttgctctggtgtcaggcccgggcccgctgtctgttccggcaaactttaggggatcgagagcttactctggactcagctgggaggcccctcgagcctgggagcagggcaggaccaccatcggccccggacacaattgctagggtcctgtcctcacactctggctcagcccagcctgggccccgagctggaggcctgcagtggggacgagacttagatgttagttttaaaatgaaaagggaaaggccaaggaaaagagagagaggcccagacggtctcttgttttgcaaaactcaaaatagatttcagcactgtgctttctaaagacaaatctttgcactcttctgcgatcctcgcttgacctctcatggtttctggcaaggacagcctgttacgatttggcatcgagttatttaaaatgcataacggcggtgcgcaggctttgccaaaagctgatatatgttggtttctggaaccttgcttttcttgtttgctacatctgatatcatcttacccagacgatgccctcgtgagatagatcccccaccccttcacattgtgggtgcagccaacgtatttcattttattgcttgcacgatctgtgtgtctggagagaaagcaaaccagttaccagcgagccacagcctagcttccccgggcacttggggaatctttatcgagctcaaatgattagacctggtttctggtttcattttggaagactggctgctaagcagatccattctgcctgtaaactgatacagatgctcagggccactgctttccccagtgcccaggacagtaggacgagggttgagagggacccccctgggccatgtcccccttgcggtgcagaggcccggcctgaatctctgagcgagaggccggtttgcctagggtgagtgtgaaggcctgaggcctgccccataaaggcagagcgtccccatggtgtggggggacagtgggaggcgggcaggccatgagccctgggttcggggaggctgcaggcgcttggctgcccatcaaggggcctggcttcctggaacagaagcctgggtgctgtggccatggaggaggggctcccgcctctggtcagccttctggcatctgggaacacgtcctccagcttttttccttagtggccaattcctgagaaaagggccaacgtgcttccatccacttcagagggcacttgtatgaaaatctcctcccctcccccgtcagccccgctgtggagggatcaactccgcctctcactggagagagacagtcattctgagtgttcggaaattgaagactagatctgggtctggttccgtacccatgccctgtgatgacagacccgtgatctctcttctgagagggaaacaaagacctcacgtttgacggggccaagaggcagccgtgggaatctgctgctcactttcaacactgggtgccttgtcctagaaagtctggggtcgtcagatcaactttgatttcctattttatcccagttaaagtggcatttatagtattcgggggttgcttctgtcctgcctttttctgatcacgacatcccatgcacggctttgggaaacgcaggtcacagtagcagggcattgaaaaccctccctccgcatggctccgcacccaggaccctggggtggctccacagtggctccattttctcccacaatggtgacctgcaggctcagggcatgagggccgaggactctcactcgggaacccagagggtgatcggccacggtgaccggccggtgagctgtggaaggaagcgtccagccctctgtggactgccctgttcctcccaccatgctactggagaccatcccaccatgctactggagaccatcccacccgggtcggtggctgttttccggtggtggcaacgctccaatggctctggttcccttactggaatccttgggcgtagcctgaagagtggacagctatccacagcccagtgagtgccctgctgggagctggaactgttcggccctcactaacaccagtcctggggagcctgccctggccccaggtgggggtgcgcagccgtggccggcagccttggtttcttcatctgggaagtgggagcgactgtgcagatgagatgaggagggtggccctggggaggctggggtgtggtcgctgctcccctagcaggaaaccaggagggagtctggtgcatgtgtgtgtggggggttgcgtgtgcatgtgtgtgcgtttcctggctggtgtgcgtgcatgggtgagtgtgcacgtgcgtgtgtgggtgtcctgcctggcgtgcgtgtgtgggtgggtgtggatcctgcctagtgtgtgggtgtgtggatatgtgtacatgtatgtgtgtgtcttggctggtatgtgcatgtgggtgcgtgtgtgtgggtgtgtacatgtgtgtgtgtgtcctgcctggtgtgtgcgtgtcagtgtcctgcctggtgtgtgtgtgggtgtgtgtcctgcctggttgtgtgtgtgtgcgcacgtgggtgagtgtgtgggtgcgtgtgcacgtgtgtgtgtgtcctgcctggtgtgtgcttgtgagtgtgtgtatccttcctggtgtgcatgtgtctgtgtgtgcatgtgtgtgtgtgtgtggcctgtgcactcacaacactggctgaaccacaggggtgtcgtccagggctgctgagggcacctgggaaaggagccggggcagaccctccctgctgggtgcttgaagctgagggtcaggacgggatggggacccggggcccttgaagcaggttctcccaggtcctccgcagttacgtgggagagcccaagggccctcagtgccacaggtaggggcaaggtcctcctctagcactgcccagaccctgtacggagcagaaatccctggaagagaaaagagaattggggtttcagaacccctttttccaaggaaagaatttctctgctcccaacaggagcctgtctgattctctttccccctctctgtctctctctgtctgattttctctcctctctcagtctctctctctcctacttcccgcttttgctttccctcttcccagggccccagcagggtctcagccatttgtatccactgagggcatccaaaagcgttgatgggccaaggcgaccagctgggctgggagggcagtgcaggcggcttgttctgggacagtgaggcccaagcaccccagagggaggtggagaccccctgggcagactcctgctcccccaacaggtcctgggctgcgtgctcagtgtccagggtcaggggcttggggacagctagtgaggaagtcttgggtcttggtgagaagccagcagagccctctgtccctgtcctgtgcaggaccagccagacctggaggccgactgccagaggggttcctaggacccccgggcaggcgatgtggaccgtggggttctggggagaagctgggggctccagggctgtggtctaagcgcaccactgtgccccatatcccagtgtgtcctttgcaaactacaaacccaaaccaaacacaacaccagccctggggaggccaggataaggagcaaaggcagccgagaggtgggcccttcctgcggccatggggctttggaaacatgtggagacctagttggccccagaggccgtctccagggcccgcccagcagcccagggctgccccctgtctataggtttcctcgctgaaacatcagtgcaattttaattcacactgctggacttcaggggagggctgatgcttcatgcgccccacgcacagctctgcgctttctgtaactcgccgccttctctttggggacgtttgtcttcagtttcttaattttcaagagcccattacagacggatgtcacctccattccctcaaatactgtcgcccttttcccccgtgagctgcatggccttttccttggtgcgggggcggtgggggggctgttttttttttttaattttttatcttttctgctgccggcacacggttctgggtttcacagcgtcagacccaccagcccttgctctatgctcagggctagaacgcagccgcttccttctgcaggttgtgccctgttcaggttaggtgtgttccagcaccttctgagtttgtggggtggaggagaacctgacccgtccgtgtttatcctgacgtgcagaccgcgggagggacgcttgaaccgggtcctgcagggaggcccctgcccttgtcttctggccacgccatggtgtgtggctggctctgcccttggcttcctccgagctgtgccgcagccacagtttttggttgttttcgtttttttcatcatcctgatgatccatatcaaatacttaaactcacagaaaagcaagactccctctctctctctcagacatttctcgtcattgtccagttgtctgcatttattttgcctttgagaaaaactttggagctgttttcttcaagttagaaaaaggtttattttgtaaaattgttatgtttctgtgtttgagttagggggactggacgctttataacctttaattcttcctgtgaaggaatgtgaggcggctgtccatttctcaaggttcctatcaaaatggctttcgctcacattttgtagttccattcacagagctgtgacccatttcttgctgggttttacttcaaaggattttttagccagaaagttaaaaaaaatcaagtggacataattaaaactcttatacttctttatgcctgtactgcagaaaaaataataataaaaataatgacagttctagcaaccatgagcaaaatttttgcatgccattggaaaagcgagggttggtcacgcctctggtctgtccgctgcatggtgataagctgaggcatccccatttgaggctgaggtgatggtgtggtgcaggccgcagctccaggccccgcaaacctcacaggggaggccgtggcccaggctgcgtcctgcagtgacgctgccctggggtctccaggcagctctcctgggacccgcctgcttcccctccactgccttcctcctcctccctcctgggcctatgtcctagataagcctgttaaattagccccataatacttaaaatgctagtccgtttaatatgtaaacaatgacaattttttttcaaagggtttaggatttaaattagtttttttaaaaaacccaattactgccgtttaattcggaggagagagttctttatgtgctaattatatagctgggaaatgagcgatcaggggctcaatggggcattaggggcactttttaaaggtttagacgtatttatctgagtttggggtttgcagtctgcattcagggctgcacaggcaaatttggaaccaggatgaagggttacacggcggtgccacggagaggaaaactctgccattccagcgtgttattatctggatgatgtttacgaagtgtcaggacctggatgtggtccctgcccaactgattctgtgtccggtgagcagaggagcggagcctgctgggtggagggtggatgggacaggggacctgggcctggtcagagcactaccttgggcccttgggaggcctgagccttccagaactttctagaaccttctagaggggcacacatggccggccaggcagatgggctgcagggagtggtctcaccatgggcagttcctcaccctgagtccctggaatgcagagggagctcttcaactgctccaaatggctctcccctccaccccccattaccttccttcctccttaccgaggggtctctctgacagatctggagcccccatgaggtccagaatgttctagagccacccggttcatactgttgcccgagaagtcaacacctctgcctcccaagagagagtagacgattcatttaaaatagaaattatgttggaagtaaagtgacccttatttggttcagcagtttttgaacacatctgattaggaattccccggggactgggtggggcagggttagataaaaagccctcgtcagggtggctgggcagggccatccagccggtccactcacccggaaccccagcctcgtgcaaacacagatactgtgaatctgtcccagacttacagaagatggacctgtaattgacactgtgctgtatttaactgccaaggatggtaaatgtcttcaggaaacactgcaccacgttttgaagaagttcaaacagcgtccgtgcagcaggtgcgttctgccgtgcctctgactgggtggtggtcactgccagactgagtggtccacaccagccccgcaccctccaggacaaagcccgaaggacggtggtaaccggcttctggtggtggagtgcagctggtcagatgcctgggagactcaggttccagggcaggagctgcaggaagaccagggaggtctctgcccatgtctcttctggaggctcctacaggaaaatccaggggttgcttttcccaccgcaaaccatgccagactctcccagggcgagggaggcacctcggggctgtgggcctgggggaggttcctgtaagactgtgttcagaggggatcttctcagcagagggcagagccatggggctcggcctcccgaagccacagccctggaaccacctggagatgatacccaggctcttgtctgtcctgcacgatggggagaggagggcagggtctgtccagaactgctccccaatcggccgcccctgacagaaatgatgcccagcgaccttccctcctccttaccaagatccaccttggcaggggccgtgccattgcttgcagtcccatctgatttctacagaaagccacgtggaagttgtccactccgttttgcagaggttaatggctctctgaagtggttcagctggggctggcaaggctgggcccgagccagctcctccatctccccttcatgtgagggagaaagccccatgaagtggcccgtgctgcctgctgggagccaagggtatgcaggcaaggggcctttcgccgcgggaatttgtgcacaatttttgaacataagtcagttcctcccttcccccaggagaaatgatcggcctccaggaagttggacctcgccttgctcaaaacaaacatagggccatctgagagcagccccaaagcacacacgtgtgagaaggaggctagagttttactttcctcccccaagactgcaaagcactggggaaaaaaggtcaggcagcgcgtccagttcagggagcgtgtccagttgtgtcacgagtgggagacctgggttcagaaccgtccagctgtgtcgggagcaggaggcctgggctcaggaccacctctgggctcctgctgggaccttggagatcagcacctcccggcgctgatgtccagtgggaaggggaagcctctacacagaggctcccacagagaggggattgtgtggagctgtccggagcgccattcagctgggggacggagcttccctggaacatagtgccccgcttgattcttgaagagaggacgtggacagcagaggagacgcaggcctggggacggacagttgggcagcaggcatggcacgggcatgggctgggcgggggccaatgcccccaaagtcaggaagatgcccccaaagttggggccgaggggccacgctcatgcccatcaccccctcctgccctcccctcccgcacagcctctggcatcagaactcgcacccttgtgcactcctgggaagccccgtcctgcttagacctactccgagggcgcgtggagcccgcctccccctggaaggggaaataggaaaaagaaccgtgaaaagctccggagttaaccgtggcggcttgaaggaccttgacctaattggtccagaaaagtcaacatcggcacctagagtgttcagaaagtgaagattaaacttaaagcgattagacaacttatttttcttttccaagacattagctggtcaaaaatgacaaaaatgtccttaagcctagctgaggcagaggcggcaaacaggcggccttttgtttggcagaggggcctgaccacccgaacccgcgtgggacacccgggagcccacctcctgagagcccggcgaggggatcgggccgggtattagccggggattagacggccgagctgctggcctggtaggggagctgccggggagctgccggccacccgcaggctgggcctgggaggccctcctggtccgcgtgctgctgcccccgggtcaggggcttctggaaggtgccacccccgggtcaggggcttctggaaggaagggcactttcctcgggagctcgctctttattttggggggctgcggagcaccccaggaaacagcaaggcagctccaagagtccagcctggtccccaccagtgaacccgagtcagcccagtcggccccaggctccgccaccaccccttggcttcgggctggactggccatggtggccccatgggcagggtagggggcctcagggaggtctgcggtgggggcagggcgggccacgtgaggcccttcatcgtacccagctcttcctgccttgcagacaccgaccacgggcccgacattttctcaagaaaagaaaacacaagagcccacatttcttatctgagttaaacaatgagctccgggcgtcctgggaaggggtttcacagtgagttcaacgtgccaggagctcttagcagccgctgccaaggccagtaggggctgcaggcttgcgctggttctatgtcccagcccgaccgagccctccccctccgtggcccgcaggtgacacaccagctgtgatcctgggtaacccgagcccgcctgacgcgacatccctggcagtgacaattaaggggtctcctcacccagcttccgggcactggcattgtgggtcccgcacacactgctggggcttaggcgtaattatagggtcgggttaccccgagaaacaggtattcacactgtttaggacaaacctcctcggagctggatcccagccgtccccagaccgtccgtcccttccccgtggctccctgggccgggtctccctgcgccctcccctgagactcctcttcaatgctccttgttgtcgcagcctacagagcctggggctgcagagcggggcaggggcctcttggcggcctgggcgcccggctggggagagcctgggcgtctccctttgtttttccagcagttggaagtagagtccaggtgtgaggagattgtttggctcgctttgtccgggagccacaggacaccaggctggggcggggctgggggcagaacgctcctccagcagcctaggagccacccctgggaagaaagggggtctcgggcagcctcgccatgggaccaccagctttgggccttcgttacaggggtgatgctgccccgctgatagggttgggggcctggggctgcagcgtagctgaagtggaacctgcccagcctgcacttcccagctggccagccccgcgcgatgctccggggtctcggcgaggcacgccaggcactgagtcctcagacccgctgtccggggacctctggtgtcgtccattttacagacgaggcagtggaggcccagaaagatggaccgacagtccccgccttagagtggctgagctggggctgggacccaggcctgaccccctctagggcttcccgtgtcacagtgtcactgtttccctgaattacagagcggggagaagccggtttctagtttggaggtgcaatgatcccccaagtccctgggtccacaggggctctgggccagctccaaggactctaagggagtggagccgcccttgctttctggggccacaaaggtcgtttctcttgccctcaattctggctgctgggtgtggacagaggagtgggcttatcaggcatctcctggccccaccgccccctgcttctcccctcctggtaaacacacactttgctctctaatggctgcaggcacccccactccatacaaacccttccttcagacagctgtaatcaatatttcatcctgtcccatgctgggtgactgggtcagttgggggtccgggatgctgggaactgacctggtttacagcccccactggccaagatgccagctggaacttggagttataaacagtggacgcttctcctgctgcccctggctctgggctggagagaggctggtgcagggagagggcttggccctggggttctcacccccagggtcccatcaccggacagatggggtgggtgaaaggacctcggaaggagtcatcccatttcacaggtgaggaaagagagtcagagatacacagtgcagggggtgggagtccaggcccagcctggagccactcccaccagaacagggtgaccctggctgcctccggcatcccctcctcagcccaggcttccagggaccgagagcagggcctttcctgcaacagcaacctgggcagctgagctcttctccccacgctgacctggccgccaccggcccgggtgcaggcatgtgaggtgggtcacacggtacagatttagatgcgagcctgtcactcggagcaaggaatgtggtgtctccctccttcctgcaaagcctcatcatgtgtgagagagagaggctagggagagtggtggctgccaggggacacgatgtcctttgcatgtttcttcctagggtcccagaacattccagcagcagcacccctccctggacactcaaggtctgctgcaggggaggcactgggggtcagattggatgtggcaaggtcccgaagaaccgtccaggaggaccgcctggaggaggtggctttgtgtggatggaggagggtggtggctcccagaagcagcactggcaggcttccttctctgcggcaaaccccatcccacgaaggtgggagtcaggtttcctaccagcaggttgatgaaatattcctgacagtggaggagcatgcctgctcttcgcagagtgcctttctaatcctcctgcacaggagcgcactgcaagctggaggggccgcagcacctgcggctgggacctcgcttgtccggaggtccctgacctcacgagccaggtcctgccatcctccctcgccgatgcttgccagtttccagggccaggcacccatttgtgctaaatgtcccacgatgcatttgaggccagtagctcttggactgtggctggagggtccgtccctgggccaaggggctcggaggggcctgtgtgcagagctggccaggcaggggtgtcctgctgggagttggaatcccgtgtaagttccccctgtgaagggctccagcctggcaagcccaacttgtcgttcttgggacacgaaagcagggggaccccagccctcttccagagaacttcctgcttcccttgccatttccttctgtccccctcctataatcctggggagaggccgcatccctcccagcgcaaccacggggtgtggctttgtgcagaaaggaaaggatcttcttcaagttcaacaatggctgccacaagcctttttgcatccactgctaagagagctggaggcagcacccatcgagtaaatacaaaagctgagactgggggagcccatcagcggggaggcatctgggctgtccctgagcaaccctgggccccctgtggtgtcatggctgtgcccccggagccggcgttggggtctccgtccagtctctgaggtttcactttcctgtgcttatgagtgaagtcttcacgccggggtggcaccctcaccttctgctgccggtgacatacctgccctcacctggtacttggaggtgtttgggagaggtgggcaaagtttggctggaaggcaactgagggagcctgccatcttgtcagagccccttcctttctgaatatggtaccagcaccttgggagtggggcaagacagcgttccagaaagttccagaaggctttcctgctcagaccggtgggtgccaacactcaggtattcccgccatgctcagggtcacgttggtcatcgtgtgaggagggggccttggagggagccaggcgcccctgcatgagggcacacagccggctttccctgggcttggtgcagctgccatcttgtgatgtaccgggtgtgttgctgttttctggatacttcagtaagagggaggcgggatgaggccgttccttgcgctggcctctcacctccccctcggccagttttcctgtgtgctgtgggcgttcaactttgacctttgggataagataatgggacttctgttctcgggagaggcttcagtgggggcttggggccaggtctgcaggggtccagtttgtctccatgacttacgcttgttgatcaatctaaacgcagacacacgtggacgagttttcaggttctcgtttcagagcggacggttgcttcatcggggagagggggacccacattttagctccacttggtgccaccgggcctcccctatgtggaactgggggtgttggaacacggcacgcagagattcttctgcacctgccttccttcctcctggagccgagccgtgcagatgagacccatggaaagagcagggctggggctgccctttgggaccctggggtgcagagactgaggcttaataacgaatcacgtgccccttggccccagattgatagcaggcgacttgcttttgtgggtgctgagcacccttgggagagcagacgacagagctgctggcaggggcggggtccctcgggggctgcagacccaggcgctcagcccagcagtgccgcatccgggggtgctcgggcactgcctgctctctgtcaccatgaatgccatcgcgaataatgccaagcattgttacaatatctgtgggttgccgtggttcctgttctccggggcccggctgtgatttttttctcatctctgtgcagagaactttgtgagagctgtggcctgctggccaggagggcgtcacctcggaagcccatgcacctgaccctggtcctgttagcaggaaagggagctgctcccgtcaaagggaaggagctccaggctgagagtggtttggtgggggtagcagtaggtgaaagacggtcctaagacacccagccacctcttttcctcctccctggttcagagctgtcccctcgccgggctctggctgggggccatgtgccgtgaccttgagccctgacagcccactcttaatcatgcctgccagacaaacacggcaggctggagttcccgcagtcagccccggcgacgcatctccctcggagaatggaccgcgggctctggattttgacaaagtcacgagcgagactggcgttttaaaccagcatgttagaaaagcggctttgggaagcgatcatttctttcacttttaatccaacatcggcagcacccgaagtggtccccgctcccccggcggatgcagcccccggatggccgttgccacgcatttttgtttaggaacctggtttttattaaatgtaattgcttccctttctggccttaaatcaagggtggcctcagcccagggacagcatcaatttgatttaattactctgcactgtagccttctgagccgagatgtggctacgggggtctcacatagggcccccaactcaggatgagcgcagaggccttgacggggctgggaggtgtttgcctccgagaagggacaggtgatccggagcccaagctctctgacccccacccctcgcctgtctctgcagagaaccggccccgaccatggtttccactccctcgctgatgtgtttatttttcatttgccattaaaaccacgttggctctctaactcaggagcaattcattaagggctatttatcttttgcagcgatattttaccctcagagctgagctcagggctgtaaaaaccgggacagcgtcgccaccaggcagctcctagaaggcgtatggggggtgcatgggctgcctggcctcccaggtgtgagggtggggccacagtcacgcgtccctctctgcatcccagacccccacagcccatgaggggtcccgcctccgtttccgcatcctgcgttccatggtacgacggatgggcttccctcggcaaaaccgtcatccacattgatcccgcagaagaaaagccggagctggcgtgggtgcccctggagaagcaggcggtcggagaaggggcacgacatggcttttactcccgatacggatcccttttccccagcatggaaacccagagccagaggagtccccatgtccctgggttttatcaacatcaccaatggcaagagggcacaggcaaggtggatccttgctcccttggctcccagaactctgggggaaaacactggacattattaagatgatttgttaaataatagaaaatgtttttcattccccaatttccagctctcggtaaaaccatcctccgtccgcccgcttctcatccctgatatttagacttatgggccaatttgggggtattttctccttctgccgtgatgaatgcttctatgaaacaatgtcatcacaagtcacctacctgccctgtcagctcagcatcaatctcgctgggctgggcggtaatttatgactggtgcctgcaatttgcaaacctaatggggaggagggacgggggagccggcttgagcgctgtctgcagcctcctcggtctccccgcattagcagaacaaatggcgcagagatcagacatcatctccaaggctcaataaatattttatcagccataatggaaattgtcaaattgatctaattgtacaatacgttatcagtgagatatcaaagcccggccaggcctctgcccggacccttctgggccgccccacctgcgaggatgggagtcagaaagcccagggcgggccacaacgtggtggcattaatcatatgtggccacagtggctcgttaaggagatgatacattttgtggaaatggccttcttctgttgtgctttgccagtcttgatatttgaagcagagagggaaacagacatagacagagaaggtgggacaaattcagaactttcaggaagcatagatgcattctcactgtctcagttggggtgggggcggccttcagtcggtcagatggaccccaagagagaatgccacctgacccgttctgtgcggaagcatgtgctgcccacggtaggggatttttaccttttctggccctcaggcctgcctggaacgagaacactcatggtgcaccgcgtttccgaaaacgtggggccgcactgtgcattcgtcagccatggggtcgcactctggcccgtgccaagcacacccatccaccccgcaggagctgggagcacttctgaaaaccaagctcgtgagaaacggagctgccccagcctccatcggctccccccgtccagggccatttccggggtctggtcttccaggaagaggttggggccagggctgggggcagctgtcagtcaagcgtctttcacagccagccaagaccttttgatttctagaacaaacagcgatgtcttagacctggagcagatttgcaaaatcgagtgaaaacatctggctgtgctaacaagcagcagctgaacacggggagccctgtcccgggggtgcggtggggaccggccctccctggctcctgccagagacctgagctgggccctcctgcacatggcccgacagtgtggtcctcagctgctccatcaaagccttaattgaccttttggcattgctccttggtctcggggcaggcgccgtcgaacgggatgcacaaaagcacagggatcctcctcacctgcggcgtcatccaaaggcgtgtggcacccagacgttgagcagagtctgaggcttcagggaagacaggctgccactgccgtgtatgttcccagtgtgcggaccccagggtgcgcacaggcaacggaacgcctgggattcccaagcctcgtgctcccccgagagcgggtaattacctggatgtggaccgtattaactggaagcccagatgtttatagaattccctgcccgccaagctgtgaggggaggcatctggaaggggcaaaggggtccaggaggggaaactgatggatggccttggctggggccctggtgttacaggctgcggagggtagcccaggcaagggaccggcatggctggccagaccctgagctgccaccacatcaactgccccctggccggggcacccaggtgcgatgctgatctctcggcaacagcttttccataagggaatccgatgcatttgctgggatgcaggattcgggctgtgttgctgatgagatcacataggggctggagaattcgtacccgcgggcacccatggaagcctgagctctgtcttttcagtcgcctgtcatttaaaatgaaagtaagaagggagaccttgtggcaaccgcagtgctgggccggggggagtcgctggtttgcagcccctcgggggccgagtgttccgggctctgatttttgctggctgagacacagggacccctgggtgtgcgggaccgtgccgggaagtgtggacatgggtccgggctgaggacttcgtcaggtgtcaggactcgggacagcaggaccctcaggcagtagggctccaagcaccagcccctcgccccagtcccagcaggtggcctccccaacttgagctgggttcatttcctctctccaccccttctttcttctcagcaaagcaaatgacatttgaaactttattattagtattattattatcatttttgtgagatggagtcttgctctgtcacccaggctggagtgcactggcgcaatctccgctcactgcagtctctgcctcccgggttcaaggattctcctgcctcagcctcctgagtagctgggattacaggtgtgcaccaccacgcccggctaatttttgtatttttagtagagatggggtttcatcattgtggtcaggccagtcttgaactcctgacctcaggtgatcctcccgcctcggcctcccaaagtgctgggatcacaggcttgagccaccgcgtccggcttattctttttttctaaatagtgaggcccagagtgcaggtgtgtgtcacacacctctggtctgcagcccctgggagctgaggccctgtctgtggatggaggaggagggactggcaagcttggggttcctggggcatcttgtcatgtgttagtcgtagtgaaggctccacaagcacttttgaggccagggggaagatgctaaggggtcctctttgccgcctgtgaagacagctgcgtggccacctggcctctcgccgcccacttcatttctttgatttcctctctggccccctcccatgactctacaggcctgtgcagaccccagcttggggcggagggacctatctgccacctggacccagcactatgggagggacaactcgtgaccagccccagccaccactgccctgaggaaggctctgagcctgtgggcaccatcactgccctggatgggggcccggccccacagggacccagccccggtacatggacaacctgggtccctgggagggagagaggcgccggccatccctcgggttggatgcagacaggcccgtgtggctttgggaaaggctcctccccatcccagctgccctgtctgcagagaggggctgacagtccctgactcacagatcccacagttccctccaaatggtcagggtcattcccactcggccaggtcccaggcagggcgtatccaggtgtccagggctgacccagcctctgccttcccagctccactctgaggtggatgaccttggggtgggtgggggagggggtggccatgagctgtgtgaagccctcactctctgtacctgccagttgtagaccccacagcaccctgcgagatggtgctctgtgtgcccgcgttcaggagaggaaaccaaggcgtgggggctttgcaccattgcttaggctacagatgggctatgcacccagccgcccagctcagcccctgcacggggtcacccccagtaaagggctctttctttcccctaaatttggaggtctcaagaatgccctgagaccagaaagcagagatacacacatgtctcagtcaccttgggtcagggggcccttctgctcttggccaccaggtaagggttgggctggcagtcaggtaaacccagaggtcctcactctctcctcccacctcccagtgaacccccagggcctcaggaacccctgtgcggcttcaggtgaggtcacctgagcgagaaatgctgggagcagcctcagcccctctgcccactcgtcttggaaggaacaccctagatgtccctgcacttggatgtctgtggagccagcccaagtaggccccacgcaggggctgacctggcaggtgatcgtccatgccacccagccaggcttcctaggagccgtgtgcctggtgtcagcaggaaaccgcccccacccctctttgggtttgagctcctggttgctatctaggaacgtccacgtgcagatggagagggtgcatgcggcacggtgtcagttcctcaaagcacctgtcagcccgtaaaccattgccatgggatacggggtggctcttcaggggcctgcagctggcgacctgggccctgagcccactggccagtgacctctgacactccagggccaggtggccacactgtgcttttgggtgttccccagccctgcctctgcagccctggaaggaggaacggggccttggacggcagcctggactggagagtccccaggggaagttcccaggccaccccagggggcttctcccgagagtcccctgacccagctgcatccagggctctggtccctctccacgtggtgcagcagtgaaattccacagcagaacagagccatgagcctcctgcagagatgtgtgtcctgcgtggtccgtacagtcaggacgtgcttcactcacccgccccacccgctcccggtctctcacttccacccctgtagaaagcgctctggctgggctatcagctatgcagacagtgaggtcattcctgcccaccgaggctcccgataacctcattaagaaagtgcaatttatctagtcggggtccatttaattatctaatttttctgagtgaggtctgactctgtatcgccccagcaggtgggcagcccggtcagcccggggtcaggctgacgtcctggagaggtcccccggcgccccccgggtcacagaaattcgcaaggtgtgagcagcgcctcgggactcacacgcctcaccgcgggtatcaggcctcctgggccccgttagggacgcaatgaggacccgttttctgcgggacagagggtttggccgagcaggaaaacatttagacacacccccacacacagcacacgtgggcatcagggctctgctgcactgcagactctccagcccccgcacatttgggatattctgccgccttctgcaccgcccaccccaactccttaccctcggagggtggaaacgggggggcccgctaaccaatgaacgttcgctgacttcatctggggtggggggggcctccccgctaacagccacattctctttgaaaaagataaacaactgggcatggggataatcatataaaccgttcacaaatccaaccagaagcaattcataaaaatgatctgcttaaaaccattgtgctgccttgccatccgttgtcaaaggtgtgaggggtgtgtgtgcacatgtgttcagtgtggggtgtgcgcacatgtgtgcttggttggggtgtatatgtgtgcaagtgtgtgtgctcggtgtggggtgtgtgtgcacgtgtgttcggtgtggggtgtgtacacatgtgtgctcggtgtggggcatatgtgtgcacgtgtgtgctcagtgtggggggtgtgtgtgcatgtgcttggtatggggtgtgtgtgtgcacgtgtgtgctcagtgtggggtgtgtgtgcacgtgtgtttggtgtggggtgtgtctgcacatgtgtgctcggtgtgggttgtgtgagtgcacgtgtgtgctcggtgtagggggtgtgtgtgcacatgtgtgctcggtgtggggtgtgtgtacgtgtgtgctcagtatggagtgtgtgtgtgcacacgtgtgtgctcagtgtggggtgtgtgtgcacgtgtgtttggtgtggggtgtgtgtgcatgtgtgtgctcagtgtgggggggtgtgtgtgcacgtgtgtgctcagtgtggggggtatgtgtgcacgtgtgctcggtgtggggtgtgtgtgcatgtgtgtgcttggtgtggggggtatgcgcacgtgtgtgctcggtgtggggtgtgtgtgcacgtgtgtgctcagtgtggggtgtgtgtatgtgtgcgctcggtgtggggtgtgtgtacgcgtgtgctcggtatggagtgtgtgtgtgcatgtgtgtgctcggtgtgaggtgtgtgcacgcacgtgtgtgctcggtgtgggtgtggacgtgtgtgttcagtgtggggtgtgtgtgcacacgtgtgcattcacttctaagttggggcgtgaggaggcatcatcagtgctggataattctggacttagaaggaaaagaaagccttgaggtctggggtgtgtgacgtgggtgcacctgggcctgtttgccgtccctgtccctttcactggcaaatcatcctcaggcagagctcagacatccacagggagactggggcctccgaccaggtgccctgggcagtgtatctgtgctgtccgcctgtgctgagatgtccgactgtggactccgtcgccctgaggctatttctgctgtcttctctttgagaaatgggatctccagtgtctggaaactatcatcattgccctgcatggtctttgtgaagaatgagaccccaaatcttgaccttggactctttggggaggccaaggcacatcttggttctgcgtcgcacacagcaccggtcccaagcaaggatctgggcacccaggacttggctcctgtccaacaggccatccataccctgggcggcctcagtcaggccacctcccccagggttcttgggtcctcatctgtaagcctggggcttgggccaggagaggaggcagccagaggtgaatctgaggttcctccaggccatggggcaggctgagagctgatactggcccctctcgccccagccagagcagaggggttcagatgcactgggccaggctatgtggaaaacccctcactgcgctgacagtctctgattctgcattgacctcaaaccccattctctgaaccccatcctgcggcaaaccccatcctgctgctcacctgcaacttgggaataccgagatgcattcagattcaagttcggcctttggcgtcttctctcgggggccctctgtccgcctcagttgcaggtggtggggtgtggttgggcatcaggacggttttgtgggaggggctgggctgagaggtgggaaggagcccccggatgagtgaagaagctgggtgcaatctcatgccctgggtgcaatctcatgtcctgggtgcaatctcatgccctggtggccctggtgagagcaggtcgggtgccaggacagagcagccacaggtggccgcccaggggtttactctaggggtgtccctcaccaggcagccctgcaaacccaggagccaggagctgcaggagggccagtggccagaggtgaggaaggagctgtccggcagggctgggctgggctgggtgtcaggcattgggtgcatccagccactcacccgcagcaggtggaacccctgcctcaccttccctgcttctgagggggcagctccccatagtggtggcccagccctggggagcagcgtcaggattttacaatccaggagatgtcaactccttgctgggacctccttgacgctcacggggctcagatcccatctcaggtgggcggtgacttgtcctggccgagccagcccagtccttctggaagtccagtttgtgtcagagcagcggcccaaagccaaagggtggtgaatctgggcactgcctgggaccatggggggaccacaatatctctctaaaatccccaaatccatccccactttacttagcacatgttgaaagtccttctagaaagccaggatgtttgttaatttatttttaagatttagtgtgttgtgggggttcatcgttccaaaaaaggaggatcccagttgcggaggaaatgttggaggaggggcagtggggaagggctggagcccagctctactggtatcaggggggtcatgggagccccccatcccaggggccctccggctttggccaccccggcttctgtccccagctccccaccactcttccttggttctctgcctctgtggattccttattgcaagggcactggcaagctgggagagatggaaacagtgggggacaggggtacgagagtcacagcaagcctgggggtggggggcatggagcctgggcaaagagcctgcatgagatattgtcagccttgtggcaggggcagccactggaggatggagaacacgggtgagaatgaaagccccaaacccacagctccttcctcctgaagaagatgaagcaggcaggtctagggtggcaggatggcttccagtggctccgagattcccaaaaccaggaggcagggggccagagtcggatggggagaactgagccccgggtgggggcagacagcctgggacccccactatgaggtctacccacacgaggtgctgtgggtgcctgcaggcctgccctgccctgccactcctggctgaggacgtcagtctacacaagggtgcatacctgtgtatccagactccgcctgggcctctgcagggagccgtgggtgctcccagctgacggaggccaggaatccatgctgtcttcctgggtttaccactcaatgagccaggctggcatttgtgaagcctcaggcagcccctggcccacagttagggaatgcccttttatgcaagatggtgctgaattttatttcatcaggaaggagcaccggccagttcccttgttaattaccatttcctccatccatccaccttcaccgctcaggagggagggaggctcctgggctggctggggacacagcaatccacccgccctactcatccaagcttaaggccagggacacgggttttctgagatgcgtgtactcctgctgttacttttgaagctgcctagttcctgttgggcctggacaaggttcaaggaggcaggagccccggggttatccaggctctgccacgatggaccaagaggccaggacaagtggacactggctggggcgtgtccatctcctgtcatggctcctgccctgaggagaggacacgggtcaccctggacaccaggacagggcacagacatccctcctgaatctgctggaatccccccgaacgcacaggcgaactttacaagcctcgcactgcgtagggggatggctttgggagagccatgtaaccttccagaacttgtttccttgtctgtaaaaggaaagctgtgggtctgacacttggcccttggctatctaaaaattgaggtttggggccgggcatagtgggtcacgcctgtaatcccagcactttgggaggctaagttgggcaggtgacttgtggtcaggagttcgagaccagcctggccaacatggtaaaaccccatctcaaaaaaaaaaaaaaaaaaaatcagctgggcgtggtggcccgtgcctgtagtcccagctaattgggaggtaaggtgggagaatcactcgaacccaggaggcggagattgcagtgagccgaaattgcgccacagcgctccagcctgggtgacagagcgagactccatctcaaagataaagtaaaataaaataaaaagataaaataaaaatggaggttttcagtctctagtccaaacacagacacagtgccacccactgcggactcccctttccctggcatctctggtgcacacctgcccaccctcccaagaatctggtcatttagactcgagcttcaaacacacaggggaactcagagtttttccagtcgccagttggccgttggggacgtttgagcttcctccttactttttggtctctgaagcccatgggagtgggagggaaagcacagagctgcaagagctatggaggccgggtgggggcgggggggctggtcctagagctatggaaacgggggggctggtcctagagctatggaaacgggggggctggtcctagagctatggaaacggggggctggtcctagagctatggaaacggggggctggtcctagagctatggaaatggggggctggtcctagagctatggaagccgggggctggtcctccagcagccaccctcggggaggtggcgggacccctgggcctcctggtcctgagatatctctgtgcctcctgcgtagcttagcttcccagttgcctttgtctctgggtacaacaaattgagtcagtgtctgtcccctcgctgggcatgggggcagggccctggggcacactctgtacccccatctggtctagagaaggctcgaccaaggtccaaaactccccagagtccagacagaagtggggacgagcagggtccttttcgggggctcttccttgggttagggattagggaacaccctacactcagttcctcctgggaatagactccgctgcaaggcgagggacagggaaagtggctgtggggtccaccttgcccagccaggccatgggccaacaggctcactctaggtagttccatgtgggtacccttcctccttttactaacaggcttcccagagggtgtgttctgatcagacttccatctgcctgtggataaagcagaggtgagatttacctgattcctaggcagcacgtgtgagctgtgtccagccaggacctggggcagaggccagcgtcgacactgctagccccaccgccgttctgggaggccgcccacagcactggcttctgccagagtgtctgagtggccgggcgtgcattagacaagagctcagcttcacggctgagaatacacggctcactgtattctccactcccggagaagagagcccaactgtgggccggcagggtcagctttcaccctgggactgtgggaagtcatcacggacgttgtgtgtggcctgtgccccctgtctctggagcaccttccagccaactgtggcttttaaatctcagaaatgggaacatgcctttgggccgagacatcccactcttggagagaacaggggtctggtgggtgggagtctgctctgtcctctgcgtggtgcttcctgaagctgtgctggtcaccactcggccccgtggcacattgctcagaatggcctcatcctcactgaggtttgtacaggatccaaaacaagaccagacataggctgagcatggacgtggctggagtccctgctgtggctctgggggcatcttgccatagctgctgctgtgatggtgaaggtggggaaggcaggagtctctgagaattcctgattcagaatctggggcaatgccaagttaggccccatttggaacctagctttgaggcagtttttattcatccatccatttatccctcctttcatccatccatccatccatccatccatccatttatctatgcattcatccatccatccatccatccatccatccatccatttatccatccatccatccatttatccatccatccatccatccatggagatatactggctgtctcaacctgccaagcagtggctactctctggctcctgaatcctctgagcagactctctaaattagatcccatctcccaaagaagaaatgaaggcttggaggggttctgacctcttttatagagatggcactggtctacggtgctgcctcctatggcagggagcatgttgctcaggaagttacacttccccatgaggtctctaagagcaagggccagtggctcctcaggacaaggctatgttgccgtccgtcgtccatctggtttctgatgcgtggctgggccaggtcccctggggagggctgcatggactcagccatagcgtgggtccttggcttcagagatgcctgaggccatggcctgagccccaggaggtccccgtcctcaggcaggaggggttttgtccagaggcttgggcccatccttggtgcctgctttcctgctgtgccctctctcccctctaccaagcccagaccagaagacaggctctgaggacggctcccaggagaacaaactaacaggggtcatttctaaagggcccctagtcagggaggtgcccaggaatcaccagaccagaggagtgaaccagtcagcctggggccggggccagccaggccagagccagctccagctccagcggtgctcagatctgctcctcttttcttctgagtgggaacaggggttgcccccacctggcctccctgtttggtgcatggtgacccctcccctgccacctgagggatctgcagccctcctcacccctgtagctccgtgtcctcaggcaatagctctggagtggtgagctctgggccaggcagggtctgggccaggcaggtgaggaacgtgggcctggggagctaaagcaggccccggagccctgggctgggtgtgcacatgtgtgtgcttgtgtgtgtctacacatgtgtctgaaccagtgttgaagccacatggtttgcactgtgctggcaaagtggtccatgtgcggctagacaggacgggcgggcggttccccaggaagagaagctccccacagcgcggtccccaggctggaccagagcggggctcccctggaagcaatccatcatgtgctgcaggagaaacggggcaaggacaattgccgggtgtcttttggaggctggtcctcaacgctggcaacagtttctctcgctatgagttggtcccagagagccccgattcacccttccggaaaaggcagtcctgtttggatcaaaaaataattagctgagctttaagtgggggtttcaagtacacatttaatttacactgattaacagtcatatgctaagtaaacaccagctgaatattaaacccgcaccattgagaagcgtggaacgcaaagtaatatagaaaacgcagtaaatacacagtttctataaccagtaattatattaataacatgcagcacttgtcttacaaaatgcaaattaatacgtgcatatctacgtagagatccaacttttgatttcacatgttaccagggaggcttcctttgcgagctccacgttaaagaaagccacagcttctgaagcaattaggctgacgcacggaaaatacagtaaaatcagcccagggacggcgctccccttcccgtgcactctcccaatctgcggccctttgtctgtgagtttctgatcttagagctgccgggtcccactgggccctgctgctgtttcccatgtgcaccgctgtggctgtcaccgggacctgccacggtcgtgcctgtgacaagtcgttaggatctgccatggagatccaccaccgtatccctaagtggacggactggcgctgtcaccacgggctggcgcactctccctgggcggcgtggtgggggggcagggggacgcttttgagggagcactcccatcccctctgggtgggcagttacaggaggcgacggagctgcctgtcgctgtggcagctttgcacattctataggaataacttgaaacttcaaggagaaggatgccaggtggaggcgttgtcaggacggccaagggcttcccaggggctgcagcatggagctgtgggcagcacactcctcccgcctccaggaatggccttcctgcctcatgccccagacctcctgcccccatggcccttcccactttcccttggcccccatggcccaagctgggtttcctggtgttcttaaggtccctgcacgggcaccattccagcttcacgcagtcggccgggcatcctgcactggcgaggagaccttggtgctggtcgcggtggaggaaggcatggagccctggttgagatgtgggctgaccgctgctgacccccaggccgttctcactcctctaccaggaaccctgggtcagggggtagtgggtagcaagtataaaaactgctagaaaaatccctttgcttcataaggagggggatcatcagtctaagcaaatgaaaaagaaactcaaattctgtcttaaaaaacaaagcaagacaccaaagcaagcctttggttcatgtgggtgaatggagattttgtgtgaaccgaccccgccatccctggtagaaacagactgtttcttcccagaccctgaagcctgcctgtgggccctgaggcctcacatcaaactccagggggtgctccatgtgggtaccaagctctaggggccagcctggcatccccccgacctctcaggggctctggagtcttccttagggaccccagattggagagaggctgccgtcctgcggacctctccaggaagggccccgggagaggcatctctccggaggcgtccagagctggctcaaacaccggccaaggcaggcggtgggacccggggcccatggctcctttcttggagggttttgaaagaaaataaaataggggaaagaaaatccaggctgcagggcttggccgcggctgccgtgtggcttcgcccgattagcatggtctccgcgaggacttgggttcgggtttgcggtgttattgccctgttatctgcgtggttggtggtatcgctgtacacagatttgcaccgtggtgttctctgagggagcagaaaaggggcccctccattgttcccgaggcacttgctcctgcgaccagcaccttccatctgttttcctttttccttcctcccgatacagcagcgttgccgcgtctcacccggaggagggagggccgcaggctcccagcacggccgccggcctcgccttccccgctcctgaaaaatgagatcatttcaaacagcgccgttttccactttgcaaaatgtgcttgcgtttgggggagcaaatgtttcaccttttattcaaataaaatctaggtggttgcaaggcttcggggattcagtgagagaccagcctggcctcagctcagggacgcagctgattttgcttttcctttccctgaccctccagagcagcaggcacccctgcgttacccttgtcttcctcttcagagctgctcggtgtaatggatttctttaaattaataatgcgtagaaggagatttacaacacattgctaaaatattgtctttgccttttattcatgcatttgtcactgtggtctctaatcgaggtgctcagagaagggataaataatgaagagagaaaacagctctgtcataatccaggaccatttgcaaattcatcaccgatattcttggggaaggaaagacagaggagatgacaaatatcccaccttgctaatatatctcgttgatttcctctcccatttatttagataacctactttgagccgtgatagaatgagggtcccgggctgctctgagcaacagatggggctgtctgcagggctcccgggcagcaggacagtttccacgcgtttgatggtggccactttgagtgttaattgtgatcggtttgattttaggtgactttgggggaaatgattcttggagggaaatggtcaaaggtgatttctgcagcaaatcctctctctgcctgcggaggtaaaagtagccattgcttctatttttatggctggatttaagtcaatgcctatccttaagaagaaggatggacccaaagccaaatatatacccccaaaagaaggacaaaatggttttctagtttggaggggttttgtttgctgtcacccctcctcctggtagaggcaggagctatgcatttggaggtttccctctctctctctagatgatttttaactgacaggaactgggaaggagggaaacaaatctgctttgggaattttttctccagaccagagaaggttggacccgttcagagaagcctccgtccttcagctccaggtcaggctcactacccagcccctgcccggctcaagcagtggccacagctcaaagccagagtcccagggcccacatgggcttttgcttttagctcttcgaggggggaagcagaggaagtggcttctgtctgagcctctgcaccaaccgtgtggcctgagagaagcaggtgggggcgtcagctctggggcggcctccagctgcctcggtggggacacggggtctcccagcgtgtcaggacggagggtgctgtaggactatggagttagcgtgtggtgcaagctgtaagccagtgagtgtctggttagaggctgggctggggctgagcacgagggccaagaggtgaccgccggccagaaccagccgtggctgcccagtcgcccagatggtggtcccagggcagggagtgttagcacctgccgggctcagcctgggcggctcagagggcgggacctggagaaggagggccgctcggcaaccgctgagccggcgcaagagctcaggccctcagggagcgtggccagatccggcagatgaaatccaggacacccagttcaatttgaatttcagatacacagcacacaagtacgtcccaaacacagccagcattttgttgtgtttaccgcatttattctattgattgactgaatttacagcatttgatctggggacctgcccccaggctcccaggccttttgcgatcccattaaaaaaaaaaaaaaaaaaaacacctttgtgggggctgggggttgattgtctcttgaaaacagacatgggccagatccagttgtttggtaggataaggtctttatgggcagaaaagagatgatagatgagaaaaaaaagagactgtaggttacagagaagtcatgggtggggaattacagggaaagtggacctgtcggctctgttcatggacagtatggtggggcctgaacagacttccccagaaagttcccagattcgcacctgctggactgggaggcgtctcagcaaatacccacaggaggctgtgtttggccactagcggagatggccccagagacaacacccagatggacagagctcgtcggttggctgaggctggggatgtgtccagggtcaccgaggccatctggcctcccccagcaccgccgggctggatgctttagccccagcaccaactatgccatcttcctcccacttaaacctctcttttgacagaggacagatatattacgaaaattacaaaataattacaaatgataaaaacaatgactgctcattgcagaaaatacagaaacagattttgaaatggaaaaccttgcctctcctcatctcaagataatatctggtatactttttcagtcctgtgcatgcatcatatagatagacacacataaatgatttctggtgtggaatacctgatacacggttgtgcccgttctgtattggcaaacacacccgcttgccaccatccccgtaacgggatagtgatcctctctcatttgaccgagtcacgctctccatcaacagacctctgggcattctagaggcacactgcgaaggggaaaagggcctgacctcaagggggttgctttcccaaaagggaagccaggctcagctgaattttaaaacttgtcttctgctgaaaatgtactgtgatcatttacatctgaggtatttaaattttcatttaaaatttaaatgtaattaaatttaaaataattttaaaacaaaataaaaatctaattaaaacatttttaaaacctattttctcgcctatacctaagtcactgatatttcaatatttttgctgagtcatttgaatcttaaaattcaattttgttctcatggcgagaaggcacgatgactttacaatctcatcgccatgggctcaaccagctgttatggggggaaaagaggagactgagctgatgggtttgttggagatttttctttttcttttttctctctttctttctttctttctctttctctttttttctctttctttctttcttccttttctttcttccctttcttcccttttttctttctttctttctttcttttctttccttctttttttttttttgagacagagtcttgttctgttgcccaggctggagtacagtgtcctgatctcagctcactgcaacccccgcctcctgggttcaagcaattctccctgccccaacctcccgagtagctggaaggcgcctgccaccacatctggctaagttttgtagtttttagtagagacggggtttcccccatgttggccaggctggtctcgaactcctgacctcaggtgatccacccgccttggcctcccaaatgctgggattgcaggtgtggccaccatgccaggccaagatttttctttaggaagtatggaaagtgagcccctgatcggtattccgccagggacagccttgagaccttgggctgggggaccctgaagcagacagggaggctggaggtacacagggcggcatgagaaccgaagccagatgcctgtcctggcacctgagctgtgtgttaccggcgcagcaccaggccacttgcagaagtactgctgcattcgccagcaagggccgccatcacgatgcgcctcgcagaccgcagggcttgagcaacaggaacttacctccaccatctggaggtgggaggcccaaagacacagtatcagcaggctggctcctcccaaggcctctctccttggctcatagatggcatctccttctggtgtcctcacagggccttccctctgtgtgtctgtgtcctcatctcctcttcatacaaggacaccagtcagattggatcagggcccaccctagtgacctcacttttccttatgacccctttaaagacctcatctccacatgcagtcccattctgatatcctggggattgagacttcaaggtgtgaatttgggaggacacagtcagcccacacgggtgggtggtgggccagtgtgtaggaggaagaagttgagttggagtccaggtggcctgatccggacactgtcctgggacacattttgtcaaggtctaacacttgctaagaggttagtaggggtacctggtactgcccagagggaccacgagaggcacttaccccatcgaagtgggctcaggcgaaaggagtgtccagactcagagtgccagagaaaatacaggacacccagtaaactttacctttcagatcaaccacaaatacttttatagtataagcatgtcccaaatatttcacgggacatacttacactaaaaaaatcatccaccgcgtatctgaaatgcaaaactaacttggtgttctgtatttttatttcctaacccagctgtgttgggctgagattcacacactcagtgtcaggcaggagttcatggggggcaccagccatgggcagccgggcatttctgagctcccgcagccagaggccttgcccttggcacacagagctgggtgggccctgtggggaccagcccctggggatccccggtgaggccgcggttcctgccctggtgtcgattgaatgggctgggcaggcaggatgtgttggagggaggatgtgccgttggctggtgtgggatcatttgcgcctccagtatgaccacctgagaccccacacctggtgtgctgggtccctggtgctcagcaagtctcagtccctggctgggggagggggctttggcctgagctgccacatcatcctcattgatgaactcaccgggcattcctgggtgccaccgtgacattgtggagcacaggaaggacaaggaccctcacagagtgtcctcctgctttgtccagggtaagggcgacacaaggggatgggacagggaatggcttgggtcacagagaacaacacagtctcctcttcactgcccacgaggtgcaggtgcaggggaggcctctggacatggtctgggtgagaagcgccatctgggtccctgccctagaaccccgtctggggctgacatcaagaccctgatgatgacggtgacccttggctcaagacagctttgcctcaggtgctgtgcagtgggaactgcaagaatgggcccatttacttctcccggcttcatgggcggggcactgttgccacctgcacttccagacagggtagctgggctcagagaggtcaagcaccttgtccaaggccacacagccagcaagaggctgagcctgggtgtgagccctgagctgtttttcgggcaggatgcagccggtggctttcgtttctttattttcccctactcccttgacaatgctgcccgtctattcggagaccctgaaatggggggaaaaggcagagactggtaacccccacctccaccaaaccctcaggcaggagccgggaggggacgttttgctgcccccactccctgccccagccctttcctctcccgagaaagatggggctcagctgaggacagctgacaggtgagggaggcgagcaggaaggagccagcgcggaaagttccggcagaacaggcagttttcaaagtttctcaaaagacggcgaaggagcgcttcggctctcaccagcaaacacacacacacaacacgctcgaaagtgctcagggaaaagtttattggaaacttggccccagagccggggagggttctttgtttgccggtcacagccacaccaagtacaaaccgaggtggtttcccacatcttgtcaaaggacggcatttcctctctcctttctcctcaagctgattagcgggtcgggcaatggcgtgaggagatgctgggggtaggaaaatgggggtcattttggaaaacctctttgtggatgggtcgggaatggggagaaaatgaatagttataagctcatttccatagaaactgtctcattatcatgctggctgcccgctggaccaggcagggcttcttgccagcaccagctccacaattaaatgtcccctgcccgcccggcgcggagaggccggtcagcagagagggctccagccccagcaggcccggccgcgggagcctcgagattctttttcttgaaataccagaggttggtggagggatttttgcggcacctgaacagtcctaagcaggcccatgccagcggcgtcccagctcctgggtgcaggatctggtgcgcctgtctccatgaggatttggaccacgttcggcagagcaggtctcccaggcttccctaaagatgtttaacaaaaacagtggagatgattgggtttggagtcgcttcctgggcagagctgctcgtgttcgggcagcgctcagggcactcggttggacgtcgccagggtggctcggcccctccacgtggggcctccacaccacctctcaggggctgccaccccttcccgtccccctagaccccaagaccccaaaaccacacatgggctaattgtggtaaaatatacaaatgtaatctttgtcattttaaccacccgtgagcgtggcattaggtggcgttcaatatgcccgggccactgcggaaccatcacccctctctgtgcccaggattttcccgtcaccccccaggaaaaccccgtgcccggtaaatagtgactctgcgtccctcctcccgagtcccgggactttctcatcacccgccacagaaactccgtgcccggtaaatagtgactctgcctccctcctcccgcagccgcgaagcctcggttccactttctttccctgtggataggccggcttgtgtgttgaagatggaaaagctcatcccagggaagcaagcatattcacaactcccaagagagctgcagcaggcccagcagagcccactcctgccccttccccccggctgaggtcgcaggcccacgaaggtcgtcattacggatttattaaccccctttccctggctttgtgagaggcctggtctggaaaatgaccaggctcccaggaagtgaatcatttaggattgacagcggcgagcccgtgcgccgatggaggcgaatcagggagcagatgagtggtgtggaaaacgcggagccaggctcggtcggcagccacgccccctccttcaccctccagtcctcctgtgtggcagggacctggtgacgcctgtgcgaccatcgaagccacacaggcagccagagaggtcaagggtccagggtcaaagcggcacctccgcaggagtggtgtcagggcccccggctctagagggctttgggagaggggatgtgcgcagaagcccctggcatggtctagagggctttgggagaggggatgtgcgcagaagcccctggcatggtctagagggctttgggagaggggatgtccgcagaagcccctggcatggtctagagggctttgggagaggggatgtgcgcagaagcccctggcatggtctagagggctttgggagaggggatgtgcgcagaagcccctggcatggtctagagggctttgggagaggggatgtgcgcagaagcccctggcatggtctagagggctttgggagaggggatgtgcgcagaagcccctggcatggtctagagggctttgggagaggggatgtgcgcagaagcccctggcatggtctagagggctttgggagaggggatgtgcgcagaagcccctggcatggtctagagggctttgggagaggggatgtccgcagaagcccctggcatgacccccttctagtgggtcagtcagcacaaccatcaagttccaagctcagattcaggtggaggacacagatctccaaggcgtgcacagccggaggcctgagtgagcacctctgacggtccagcccagagtaggtgttgagtaagagcggtcaagcagtgccagttggtaaaacccacgcggcgttagcttcctggggaggtcctaaccgggtaccccagcctgagtggctgaaacaacagatacttctcctcccacggtcctcagggccagaagtctgggatcagctgtgggcggggcggtcctttggaggctctgagaacccttgtcccggcctccttctggctccctggggctgccggcatctttggcgttccctagtttgtaggagcatcgcccagcctcagcctctgtgtgcatgtcatattctaccccgtgcgtgttcacgtccagagccgtgttttatcaggacacggtcatttggataagggagccacccccagcaaggtgagctatcttaacccatcgcatccgtgatgacccttcttccaaataatggccgctgggactgcaacctacgaatatggataacctcacttcatctcccatggccccctcttcccaagggagccctggggcccaggggacgcagctgccaccaaggccctgctggaatgttccctgatcctcatccagccagccaccccttccctctaaagcaggttgttctgaatctgggccactggcccgctgcgccctgaagcctgtgtcgtccatcaacttccagaggccgccgcttcatgaattacacaccatgcaaacgtccggccagcggcttaagtataaagcgtgagaaacacaggagatcattccgtgttcgtggttttgtaaggtttgaaaagcgatttaaaataattttaggttgtcctggggttggcgaacagtgtaataggaaatttgagaaggcaaagtttttaaactgaaaggttttgcctccttgtttctaatttttagaaacatgatggatgtcagccgtgacgttgggccgacagcttctgggaacgatttcccagctcgctcggacccaggcgggggaccctgccaggagggcaccgagggccatggccacgtacagaaagaggacggcttccagtcttcaaattggaaacctgcacccggcctcccttggctaacctcaatcccataagcaatccgaaggcattgctgagcggacagaaaactttcccggtgtgtagcccgctcggtgtctctggaaaccatggtcggaggtgtgagggattgctcactaaacgcggacggcaggcgaggggctaggaggcggcgtggtcgagcgaggtgacctgcgagggaaatgaggtcacggtcccgcgtgatcatggggtcaggtgtcccggcagcagtgcaggggaggggctgtgtttgcggggggaggctgttgggaaatggaggtcgcagtgctccacccaccgcccagcccgcctccgttctctgctggccccagctccttgggagatgcaggtgggaaggccgtcgccaccgtggggaatcagatgtgccccgtgcttgttccccagaggtgcaagccctgacctccgccctgcacaggcctcctgccaccctggggatcagccgtgttccaatggtaggctggcgcctctctgtgccaagtgacatggtgcttggggagatgcctgggcatggcctggtaggccagtcacaggagctccgggcccccctctgcctggcccttcatgcagggactcagcaggcaggcagtcttctggtgtgagcgcccgtgggctcaggagtggggcttacctaggcccagggacagggacttacctggcctcaggggcatggactcacctgggctcagggacagtgacttacctgggctcagggacagggatgcacttggccttaggggcatggactcacctgggctcagggacagggttgcacttggcctcaggggcatggactcacctgggctcagggacggtgactcacctgggctcagagacagggactcaccagggctcagggacagtgactcacctgggctcagggacagtgactcacctgggctcagggacagtgactcacctgggctcagggacagtgactcacctgggctcagggacagggactcacctgggctcagggacagtgactcacctgggctcagggacagggactcaccagggctcagggacagggactcacctgggcccagggacagggactcacctgggctcagggacagggactcacctgggctcagggacagggactcacctgggctcagggacagtgactcacctgggcccagggacagggactcacctgggctcagggacagtgactcacctgggctcagggacagtgactcacctgggcccagggacagggactcaccagggctcagggacagggactcaccagggctcaggcacagggactcacctgggctcagggacagggactcaccagggctcagggacagggactcaccagggctcaggcacagggactcacctgggctcagggacagggactcacctgggctcagggacagggactcaccttttttttctcccagtgaccacaccattccgttgtggacccaacaaggtgcatggtgagcaagtgcttgggaaggggctccctggggcatgtcgggggcctgggatggcgggcgagcccctcctagcccctggtctttcctgttcctgggtctgagtggcgcatgggaacctcaccttgctttccgtttggctgaaattcattaactgccaggaaatcatggatttccaagcctggctttttccatagccttttgcttagcagagaaaatcaaatggatgcaagcaaataatgagaaacagctcccgaagagctttgctcaaacacggggctgtctggtggtgggcgttctgcggaggcaactccgatgcccacgaggggtccctgccaggtgccacaggccaggcgtctgaccgtggggaaccctcggaggttttccacagtgagcgtggacaattctagcaaggagagccaaacgctgaggcgcgtccgggcgaggctcacacgtgctgccaggtgacaaactgcttttgctaagcccacttggtttggcggctccctttaaatgaggccttctcaggaatacaaccccagggaacacatttcactggcctcaaaagagaaagtgctcacgaaggggacagtccctcgcatcgccagtaaccgcagcctcttctcatctgcacactggccctggctccctgacccacaaggttgaacagaatgcccacctcccatcacccagggatgacggctggaaagggaaccacagcgcggcctggggcccggcccaggtggggagaagccagaggactcactcgggtgaggttctttgcctctctgagtggccccatggttctcaccggtaaactggagttgccatgaagctcactgtgtctggcgctggccgtgcaccctggttcaattgctctgtcctcacggcggcctacgaagcaggtgctgtttttctcctgctgcatagatgctgctacaaggcccagagacctcaaggcacttgctcgagtacgcacggtggacactgtccagtaaggctgaacacgcaccctccaactgccctccatccccagaaggactcccagggaggtgcagggagcgaacacagggacgatctggattgcacctggcagggaaggctcagctggtgctggtctacatggctactactactaccaccggggagcctgagaaagcgatttttccaacaatatgatcaagagaaaaatagaggaggaggagccagggtgaaggcccctgtccctcccaggccttcagcctgtacacaaagcccagcagttgccctttacgtgagaggaatttctgaaaacgaccccgttaaaagccattccggaaatccgtcatccgcagaactcaaagctgctcccagttttctgggaattcaggcctgcgtgggagagcctcagggttagggacaagagggcctggtggctgggggctggaggaggtccccatgcttgtcaccgggggtcacattcgcgctcatgtgcagccggggcgaagggcctcccactcatgaatcctgccacaggtgaagaaggtgccaacccggagcctcctcccagcgcctctgtggcattgccccctgctcctgccatcctcccaccccacccctgcctcccagcacctctgtgacattgcccccctgctcctgccatcctcccaccccacccctgcctcccagtgcctctgtgacattgcccccctgctcctgccatcctcccaccccacccctgcctcccagcgcctctgtgacattgcccccctgctcctgccatcctcccaccccacccctgcctcccagcgcctctgtgacattgcccccctgctcctgccatcctcccgccccacccctgcctcccagcgcctctgtggcatcgcccccgctcctgccatcctcccgccccacccctgcctcccagcgcctctgtggcatcgcccccgctcctgccatcctcccgccccacccctgcctcccagcgcctctgtgacattgcccccctgctcctgccatcctcccaccccacccctgcctcccagcgcctctgtggcatcgcccccgctcctgccatcctcccgccccacccctgcctcccagcgcctctgtgacattgcccccctgctcctgccatcctcccgccccacccctgcctcccagtgcctctgtggcatcgcccccgctcctgccatcctcccaccccacccctgcctcccagtgcctctgtggcatcgcccccgctcctgccatcctcccgccccacccctgcctcccagcgcctctgtggcatcgcccccactcctgccatcctcccgccccacccctgcctcccagtgcctctgtggcatcgcccccgttcccatgcagccatcctcctgccccacccctgcctggttttctggaacccctggaaccagcatcacacaagtgagcaagtggctctttccaatcttacaacccccgcggtggaaggaacaggtggaaagattgttgagacttgtaaattagttgctaatgaggaaaatcaggaaatttgctgaggcataaaaaatgagaagtccggagaaagaagacaaatggacccgcagctattcccgccccacccccgcccctcgccctttcataccctggtttagatcagaccgaaatacagatctgatgcctaagttaatgcaaagaaattgctttaaaatgtaaaggtgattaattggattaatgtgcaaaaaatggttaaagtatgtcagggaatgaggagggagtgggggcccgtgtttcccgggccacctgccacctgcccggcccatggaaagtgctctgccaacatcatttcctggaatgctcagaaggaccctgccaggtggccactgtcgttccacttctgcagatgagaagctctggcctaccgagcctactcctggagccaggtggttgctgcccacaccccctcccacctgagctgacccctgtggccacgcccagggtgcaggttcaggaccagtgcaaggggacatggggctgtaacctgtaggctgatgagtccaacagaagcctccccacccctgtaagagggacgtcctgagaccctgtgctgtgccgctgctgcggtctccagcctctacttggaaggcttgtgacaagtgtggtgtgtggccctggacactttctgagcctcagctggccctgatgctaaatgggcccatggaggtattgtgtggattttctactgtttcttttcaacaaaacccatggtttggaacctcgggaagaaacaaacctcataaaaatgtgattcctaaggcccttccatccggcccccaccaccctgaatccctagggttagaaaacactcctgaggctgacccagagctcagggaaacaccctacggttgccatgggagccccgtccctagcgactctcctcagggccgggggttggaagataccacacaggggtgggagtgcaggccgaggggcttgttggcctggggtttgagccccacccctctcccgtgcacagcctggggcatgtgctggcttctctgtgcctcagtttcctgatccataaaatggagataataacaggccaggtcccggggttgttgctgaggggcagagtatccctgtcacctcctcaacaaagaggctgacagaggaaaacaaacgattaaagaaaaaaaaacagagcccgccccccacgggccccccaacacccgcaagggcctgcaccacttccaccgtctctggctcctgtacgccatcaggatcttgaaggggcaggtggggaagggctgggctcccccgcagcccctggttccccccgagcctcgggccctctcccctggctgccgtgtccatgggccacgctcgggtcagcggcgagctaacgcctttgtcagggtgattaatagcggggggactgtcgttaattcactgcctaatgaccgcggcccgcgcgctccgagtaatcgggtgatgtatgtggactgtgcacacctcgtggcagaggtgaaaatcatttcgacaagtcaaatattgtcacagggaacaaatggctctccctgttaataaaaattaatgaattttttttttctttcttttttcctcgccgctggcctgctaaatgaatctgagggcagctgagcgcggacgggctgggaagggttaagttcttgattccgtggttaaaactatgaacgtcttcatcagggcaagtgcggccagggggccagggtggccctgcacctgcagcctggctgcttcccccaggagtgcctgcaggcccttccggggtgggggtgcagagatcccccgctccaggcctgaaggggtgaggcttccagagaggggctgcagctgtcccaggctctctggacctgagggtgatgggagcaccttcaggctgctctccccacccctccactgcagccccatcaccatgtgggtgggaattagggagcagagccgagtggattaggaccaggtgctgggcaatgagtttatccagggagggtcctcctggccccgagagccggagcccaaggtggcaccagtttccctaggagcatctgggtggcccccagaccctgccctggctgcgaggggcggggagtcaggcctcaaaggcctcagcctccgcagctccccacccccactctggtgggaggccaggccagggcagtgagccagcccgcctctgtgcccagaggaggcggggcccgggggagcaggggaagggagggcctgcacccaccattggcaacaaagctgtcctggccgctcccgtcaccagggctggaggcacacggacatggacagtgccctccccaccccatgatgcaaacccccagttttcatcccagcagccagggctgtcgggagcccatggccttctctgtctgcagcagccacggtggaggcaggccaccggggaaacgtgtgtttcagctcccagagctcgggctgatggcgccagcccaaacgaggctgtcctccccagcccgtcttggctagagagcccacacagcctcgctgcagtccctaagggaaggctgggataggggcacccctgtcccagcgggaccccgcacccctcagcgccccacggagacctgcaccttccagactgacagtgctcggggccctctctccctcttgcgatttttatttcggggccacgtttgtttacttgcggcgtgacttgctctggcctgtgcacggcagccacaggcccagttggtaggaactaaagagataaataagtctataaatagtttggtggcggtcggctgttacggcgcttgctcagcatttaaccccttgttcctcctcctcgctgtccgggcagagccagggaaagggaagcagagaacagaaatctccgagtgtgttttcttttctgaacgagccctggctgagtgcactttgtcctcgggtggcctggcctgcagagcctcctgcgaggacgctggccttgattgcaaccccctccaaaccctcagtgccgcaggtgctctggcagctggcagaggtggccatcccagggtcactggccatcccttcctctgccctcggtatcccacttacagcctccgagtttgcagaaacacagctgtgtgtattggggggcccttccccaaatctgctctggccacgagctgagctggctcctgtcctgccctcctcgggctggcaagcccaggccccttctgggttctggttggctccatggaacctttccttcctctttctggaaggaccccaggactccagaacacctaagcacctggctgagcctccaggaagagcctgaggaagcctccgggtgagaggtgaccctcgtctctgtggccacccgggccctccaccagccagaacctcttgtcgccctgcttggatcaggcgcctcccgagcacaaagtcctggagcagcgagccgagctccaggtgcaagccccccggcctccgcgccaccgggggagctgcgatccagtagaacggggtccccggtgctgaaggagcatccctgggcccagcgggaggctgtgaggtactcaacggctccacgatgtccttatgctgctgtgggccctgccggctgccaagccagctgccctaggtgtgggggccacctagcaatcagggtggagaaggagttgagaacagaatcacccactcacatgcaggtgaggggcagggcatacggctctgaacgtcccccacggtcttcccggttggattcgtgcctgttttacagaggaggaggctgaggtccagaaggtggaagtggctttaccccactcccaaggtacagaggctggaaggagaccctgtccttgcctataggaatgagagtcaaccagggtggtgggggaagtcaaccttacctgctttccagagaccctgagatctgggcagtggggctgctgacaggagcctcgtttcacttgggtggaatagcctgggttttgttgatgctaagagcacgccgtagattcagacggcacacgcatgttcacacgtgcttcccacagtggcgtgtgcttcactgtagctaaaatgtggacacaccacagtgtccatccacagatgaagagacaagccaaaggcggcacccacatgcctggactattagccctcaaaaggaaggaaacggcgacacacgccaccacctggaggaaacttgaggaccttgtgctaagctaagtaagccggctgtgaaagggcaatagtgtaggatcccacttacgggaggtccctagagttatcacatgcatagagacggaaagtagaatggtggctgccggggctgggggaggggatggagagtgtctgtggggtagactttctctctggggagatgcaggagttctggagatgggtggtggtgactgaaggcagcgcacagcatgaatgtgcttaatgccactgagctgtgcgctgaacaatgactgaaatgatacatttgatgttacatgtatctgcccacagtctttctagaagcacgctgtcacgatgccagatcttagctcgtggagctagtgcttggagccaacaccgcctggtatttgaggggtccagtgcatgcacagtgaagggttaaggagaggcaccccgctctgctgccgcccagatgctgcttagcgcagggccagggagcctcggctgtgattcaggagggaaacagtgagatgtgagcaatccgtggctaccttgctgcccccggggctcagggaagtggtatattaaccaaggaataaaggagaggaagaaaaaaggccaaatcacatctctctgaaacaaagaggctttttacccggaacaaggctttataaaaatgacagtggcatcgcgagtcattcagcgcctgcccggggcgatggaggcggcgaggaaatacaggatgcgggctctgaaatgggaacgctgctgtccccggagcattgcacggataaataatcgtcttagaataatgcatcggctttaggtagggccaggtggcctgagctgcccgacagaggcctccgtggccctgcgtgagggccagattcagctcggctggtcaggggagattccaggggctgggaggggcgttcgtgggcagtggcttcgtggaccccagtgggactttgtggtggtctgtgcagcgcagccaggcccacccgcctgccccagaggcgtgggctgcgcagaggctggggctgtttgcccttccccttggcagcggatgtgcttctctccgagcttcagggccggcccctggtggggtgaatggcagtcacacatcctccaggctgtcatggggccgaggctccgtgctcagcaatgcggttcctctgggtggtttatgctcccggtgcaaagcctttgttcttcctctgagagaagggggccaacaacctgcttcagggcaccaggagcacgttacagccagaggggctggcaaggagggtcatgtgttctcggccgggcccgtgctatggcccgtgctatggtcgctttggtctttgtgtgagtgtcttgggtctgctttaacgaaagagcacaaactggatggactgaaacaaccgaagggtgtgctcctactccggaggccagagacacaaagccaggctgtggacagggtcttgttccctctggaggtcctaggggaagagtccccgctcacctctcccagcttctggtggctccaggcattccttggctcggggcaaatccctgcctctgtcatcatatgggtgtcacctgggcatgtctctgtgtccttctccttgtcctataaggacatcagtcccattgaattagggccctccctagtgacctcacctgaacttgattaccactataaagaccttatttccgaatcaggtcacattctgaggcctgggggttagggcttgaatgcaccttttggggtgacatcattcaactggttacagtcttgggagccgctggccagcctgggtgacagtgggggctggtggagactccctgagtcagaagggcagggtctgtgcttgcctgctgtgtgacctggacaagccctggagtgggtctcaatctgcttccttcatctctaaagtgaaggcagcactgtggactgtccctgcctccctccgtgtctgcgacaaaggcgagtgtgtgtgaaggtagccaggctgggggtttgcatctggtcaggattggggagataaggcaggaagccccacctctttgctggggaaatttctgtgcttcggtggctccaagagggctgggagcctgtctctgaggtcagggctccgtcttcccaggctctcccgggccctaatgacaattcggcttcatcagccctgcagctggggttcaacgttccccagtctctgtgggccaggtcccgggtgcaggtttgagatagaaacggcaattgatcatattaatatttagcatgtttgcagaaacggctttctcagtgctatcaatctgctgtgttaatagcggccgcttggttctgggcacagacgctcagaaggggaatgccaatgagtcccagtgccgcagggcagccgcggtcccgggctggtcagaaggtgggaccagcggccaaggctcctcctagcaccatttcctggagttacgacagctttgttcttgtctcaaagccaagatccagggcgaggggagaagctattgcctttaccgcacagttttaaagacagaagaacaagatagaactccatcagttcccaagtttctctttctagcaaactgtttttgggaaggggccttcaggatgaccctgccgctccaggagccctcccactgaagaagggccttctgttcaccagggtatactcggcagagatgtaggtgtacagaatcctctgtgaggaatgggaacaccctattttttctctagaagttgcctccgtgcgtgcctgctctccccgatcagctctcccacaaccacagcctgcctgatgcgcccacctctccctctccctgttttgttcagggggcaggatggcccttcactgctcatggggactcataggcacccagttgggggaacattctccaggtctctgacccactacacagcactcctccctgcttggttctgagaaggaaaagaggagccagaggatggggccccaacaagcctcaggtggaagctgcagtcccgtggagccaggcacagctccggccaagtcccagaactcagacctgcccacccgccacatgggtgcagggagggtgacagccggtcagccctgaagaagcagcagagaaaccagccctttctccgaggcagggcctggctgagaaagcccagacgttcctctcagatgagccgatcagggtcaagggcagagaggagccagggttgtgttaatggagcttcacggctagggaaggaaagtcagaagtgggagtgaggctcctgccttctacctcttctgttggaaactgccctggaggttgcccttaccccatccatccatccactcactcacccatccatccatgcagccagccagccagccagccagccagccatccccttataaatctatccacccatccatcccctcatccatccatccaaccatccatccatccatccatccacccattgattcacctacccatccattcatccattccttcattaacccatccatgcactcattcatctatccatccatccatccatccatccatctatccatccatccatttacccatctatcccctcatctatccaccaagccattcatccacctatctatgcattcatccaccatctgtccatccatccatccatccatccatctatccatctgtccatacatccatctattcttccatccatccctccatccattcatcccctgttctcctggaggcattcacaccttgaggtggcctttggggaagagctgcctcatgctgggtcctgcctctttcagagcagggcagcacagctcctcagagcaggaagacccttctggcagacaccaggctgcatccatccatccatccacccacccattgattcacccacccatccattcatccattcactcattaacccatccatgcactcattcatttatccattcttccttccttctgtccatccatccatcatccattcatctatccatccatccatgtacccatctatcccctcatctatccatccagccattcattcacctatctatgcattcatccaccatctgtccatctatccatccatccatccatccatccatccatccatctattcttccatccatccctccatccatccatccccttataaatccatccatctatccaccccttgattcacccacccatccattcatccattcattcattaacccatccatgcactcattcatctatccattcttccttccttccgtctaaccatccatccacccatctatccactcatccatccacccattcattcacatacccattcattcattcatccatccattaacccatccagcactcatccatccatttttccttccatccactaatccatccatccatcccctcatccatctgttaactcatccatccactcatgtatctatacacttatccattcatccacttatctatgtattcatccaccatcttccattcattcacccatccaccaacccatccattcactcatccatctattcatctattcacccatctatcaatctttccatccattcgtaaattcatccacccacccacccatccattcagctatttatctctccatccatctatcaagcatctattcacactcccacccatacctcttctgctggacatgacgaaggcccttactgactgccaggaaactgtttcaggtgttttgtcattgtagggagaacacggggtcgttagagtggcgtttgagaagcttcgaaatcaagactgtttgaacatctcccagctcgttcctgactagctgtgtggcattgagcaagttgctcactctctgagcttcacttctttgatgtataaactgggtgaggtcacaactccaccttccctccagggctgctgcaagaatgagctggaccacagtgccggctgcatgctccgcggcccagtcaatatcagcagccggccagtccccaggagagcgagccaacgtcagtgctctattgtctgattagaggctgattgctccaaagttgctcctggaatcattctagaatcgaacagctgtgtggtcaaccagggaccatgtttcctcacagtcttggagttgtgatggaggcgttctctgtcctgaagttttgcctccctttgtaattgcatttatatgttggcctgaactgatcagtaagtttagatactgttttggatgggccaggtgagactgaatgcaacctcaggcgttcacatctcgaggtggcctttggggaagagctgcctcgtgctgggtcctgcctctttcagagcaggccagcacagctccttggagcaggaagacccttctggcagacgccaggccgcggcgtcttgctgcctctgggcaggagactgaagttaaaaacagacttgcaaggctcggccatggctgggttttacaagaatgatggcccggtgtttggcgagctgaggagtggatcctccccctgccagcgatattagggacgatgaggagcacgtggcaataagacggcaagggtttggtcccctcacacccaataaaaaaacgcctttcatgagagaaagcagttgcaggggcagctttagacttgaagcttttggaggccacatctacacagacaggtaaggggcgtctcgaacacagtccttctgaaattcttggcgaatctcccctccctcccgcaggcttccgtctgcctccctcacctccgcacagccccaaacccagaaccgagctctgcggagaggtggttctttaacagccacgtcttcctgggaaggctttggatgggaaaagtgctttgcagcccagctgctgttctcccggaggccggggctcctggaggctgccgcttgcttttctccgcctgggtggcaaacgtgtgtacttaacttgaaaaacctcagggtcaataagggtttcagtccacattttcagagcgatcttctcgacattttagaaaagcctagttccctctgttaaaccctgtttcccccaggatgcacccttgtcactcagcacttccccatctgtccccaccacccacttcccaaactcgagggccctgctccttgagggcacccctcctggaggctttgctgaagcaccgattgcctgcacacaccagccccgccccaggtcagtgggcctgggtggacctgtgaattacaggtctagcaagtcctcaggggatgcaggggctgctggcggggactccactcagactcctgagccacaggggctgaaacccacagccgggtccacccaacctctaaaaccttccggtcccacctcgctccaaacaccttgcccagcccttcccttgggctggccctggccctgcgggtttagagaagggggtgacccgatgctgcacctttcacgggccttgaggcctgatgttactgtcagggccttggaggaactcagacaaaccccatccagggctctccccggttttgaaagtgcccatatggcgcccaccacacatattctctctgctctggacttctctgcctgatggttgtggggaatgtgtagccgatcccaaccaaaataagagggctccgcctggactagggtgaggcagagaggccagcagggccaggactggggtcagagcgcttgtgccccagggcatggacaggctgggtgtcaggggcagggagcgtggactcaggagtgggtgtggttccagccctcagcccctcactgggggatgacaggctccttcacccccctgtgcctctgtttccccagctgtacagtgggcagctcccctgagggaggagcacaccctccttccagagccactcactgcttggtccacatggctggatgcgggcacctgagaggctgtgacatcacatccgtcccaacacctggaaacaggctgagaaacctgctgtggggtggcagatccatcaggcagcatgagggagagaaaagggcccccgagtgcccacccggctgccaacccagcaggcccgcatggcaccgtggtgcagattgaaggggccgcccgctctcaaggccgggcacctgcatcctggcacctcgctggcctccgccttgccctgctcaccaggcactagcctccttggagggtgtggaagattccaaggtgatccggccccgagtgatctcgtacaagcttttctggttagagagacggttcccaaagcccagagatctgtggcctgagtgtgggtcacccctgctttcccgggtccctgttcctatcacggtggaccttccccaggctgccaccggatttgtttgctccatcatgacaaagacattaacgaatgacaaggttcttggtggtctgcagcgcagaatcgttatccctggactttcctgtcccttccgtctcatacttttgaccttaggttttctgaaatgtgacatttcagggaactgcacagcaaaggattccctcgtgtttctcaggttgatcagaagcacctactgccaccctccacagttatttctgttgtttctgttttttgttttttgtttttgtttgtttgcttgtttgttttaagcagctcctcccaccccccaggccaagacaaggtatctcggagccgggcaggaatcatgaagtatgttctgctgtaaactcacaggcctgaagtaatcacacatccacgtacacacaggtggagtgaggaaccgtagatttttggagtgggtgttctttccactgaaatgttccttgaaatcacgtggctgggtgtgcagttgtaagaaacgccgcgtagaggccagcctgcccttggcgcagtttctcccggtgggtcccatcttgggcatctccaggaccacatcttggccccatagagaggtgtgcagctgggtgggaccgagtccccacagggcccgagggccgcaaaagtaaagacccaggccagcatcaggaggcccccagggaacccgcatggggcctagacgagggcagcccggggcagccgagcgccattcgctgccttgcccttgagggagggaggcaagggggcccgaacttcagcccctcacccagcagacgggagacccttcctcctgaggggtctccagacagaagagaaacagcgtttcccaacccagaggccgcatagaggctggggtcagctgaggttgccctggacaccttttcaggttcccaacagggccctctgcttacacacgcagtcttacgcacggccttacacacgcagtcttacacacggcctcacacacgcagtcttacacgcagccttacacacgcagccacacacgcagccttacacacgcagtcttacacactcggtcttacacacgcagtcttacacacgatcttacacgcggtcttacaaatgcggtcttacacgcggtcttacacacgcagtcttacacgcggtcttacacacccggtcttacacacggccttacacacgcagtcttacacgcggccttacacacgcagtcttacacgcggtcttacacacgcagtcttacacgcggtcttacggtcttacacacgcagtcttacggtcttacacacggtcttacacacgcagtcttacacacggtcttacacacagtcttacacacgcagtcttacacacggccttacgcatggtcttacacacgcagtcttacacacggtcttacacacgcaatcttacacaagcagtcttacacacggtcttacacacggtcttacacacgcagtcttacacacggccttacgcatggtcttacacacgcagtcttacacacgcggtcttacacaagcagtcttacacggtcttacacacggtcttacacacgcagtcttacacacagccttacgcatggtcttacacacgcagtcttacacaagcggtcttacacacggtcttacacacgcagtcttacacacgcagtcttacacacggtcttacatatggtcttacacatgcagtcttacacacggtcttacacatgcagtcttacacacggtcttacacacggtcttacacagtcttacacgcgcagtcttacacacggtcttacacacggtcttacacacgcagtcttacacacggtcttacacacggagtcttacacacggtcttacacacagtcttacacatgcagtcttacacatgcagtcttacacacggtcttacacatgcggtcttacacattcagtcttacacacggtcttacacacgcagtcttacacacggtcttgcacacgcagtcttacacacggtcttacacacgcagtcttacacatggtcttacacatgcttacacacacagtcttacacatgccttacacatgcagtcacatgcttacacatgcagtcacatgcttacacacactgtcttacacatgcttacacacggatactcatgggatgctcacattcacacgcactctgggggccgcccttccctgccagccaccacacggtgcctctttcctgcccagtggggcctgcaggcctcatggcttctctttaaaaccacatgatgaaggaggaagcacagccaggcagataccgactccgaaaaacccccttgtactccctctggccaagaatctaggctgaaatctgcccatccctgacacagagccgctcggcgctcgggctgcggggaaggggtcgtcgtgttggtaatccccctctgagggcactgctcgtgtggccctggcaggtggacggtggtgagggatcccctgttggctgttgggctcctgtcctggccggtttagcacagtggtcctgatctgtggcctcttctctcgctctctccagaccccaagaccctggccatagctttgctttctagatatgggtctcttgggagatggtgggggtggcctctgttccaggatcatttcctatagcctgggtgaggggtgctgaaggctcccactgtaaggctgaaatagacgcagccctaaaccaagggttgtggtggagcccaggggcaatgcgaggggcagaggtcaccgtgggctcccagccagctcggtctctgtcccagcccggggcagcagcagggtttcttcacctcccttacctgtattatgcgatcaaatgacgatcgctcatacgtgtgtgtgacaagactcaaagcagggcctctccgtgaagatccccaagcacatagactcggctggaactggcagatcgggaggtgcttcacggcagaaaggggtggccttggccccaactcggggtcactcagctcccttccagccaagtccacctcttccctcccgagctccctgcctccccactcccctccttgcttttataattccacaggtctccccatagaaattctagaaatgatggcctcagtaccctggaatgagatcatggcaaatcccaaataaaggatgtcaggtctcctgacaagtcaatcacacgctgttacccagcctgcatctccaaagtcatacatgatcctggccctgcacactgacctgtgagagagtgcctgctggaaatgcacacctgtgtcacagaggcctgggtggtaggccagtgaaaagatgcccacgtccagaacaagcctgtccagcagggcagagggtcgggcagcctcctgaacttgctgaccctctcgggggcatcctggccggagctcagggtggagaagggctgactctgatctcccggctccggttgttccggggaccccagagagcgagtgatctgtgcctggcctgctggagcctccgtgcaggcttcccgctttctccgggctttagggctgttctctgcacctcattttctcaaaatgttttctgcacacgaattagccctcctctcacccacccttgaaagaagagctccctctcccccagcaacagggacagcaaaatgagacgggtttttcctggaggctgtgggcaatcgcttaaccccgtgaccgccggggaagggaggccgggggcccaatgcacaggcctgcctttaatcagcaggaaacactacctttctctcctaagctgtttgcttggccagtaaattaaacatgcccttaaagcgctgattttcctccagcgggtcaggggttttgggaagtagaattcaaacagaaaaaagccatgttttaaacggagccctgcaacggatatgcacttgatgcggacgctgccccacttcgggctccagcggaactcccagaaacacctggggttctaattcctacttgtccttcgggcagaggcgcccacgcccgagaggagttaaggagcgcgtcgagggggcttcggcctccaacccgactttgtttgcgagctccgtgcagttaccagttccaaataacaagatgccatgttaattaccaccccccccaatgtacctttctgctgcacacggtcagcggggcgggggttatgggggtgttctttcaaacctaaacaacttcaggtctttaggggggaggaacagcagcggcagttctgtggctgcgtctctgaaaggatccgccgcgtcaattagaaaggacccgttggccacttaaaacataataattacttctctgaatgctgatcaattaaataagtgttttccttacgacttttccccccaagactttggtttcttttgaaagaaagcattttgctacttcttgtgctgatctgtttgcaaccagtgtgaggaatctgaagtcatttttcctgtacttaaaagttctggtctccttagaggcttctgtttccgcagccaacgacagggtgcggggcgggggccgggaggcgagggccagcaggaccggggtccagtcactttcacgggtcctcgaggcagccacagaaggaggggcttgcgtggaaagatctagatcaggtcagggtgacggagctcaccccacctcctgtcccttcccgctgctccccacctaacactcgcgcctgccttttttatgttatcgaggcagaattcaacctctgtaaagggggcgattcagtggcagtgagccgttcacccagcagtgcgaccaccccctctctagtttccaaacacctcatcaccccgaaaggagacctgggcctctcgctgtcacccccaccccagtccccgagatctcccatctgcttctgtctctgggggcctgtgctggatgagtcgtctaaatgccgccaagcaggtgtgaccctctgcatcagcttcctatgccgagtggtgcatgtcgggggctggtccaggctgcgcgtgccagggccgccctcctccttggggaggggtggtgccacaggtgtgaccctctgcatcggcttcctacgccgagtgccgcatgtcccaggctggtccaggccgccttcctccttggggaggggaggtaccgtccactactcatccgttccctcattccctcgcagacggacatttgggctgtttctgccttctggcgatggtgaatctgccactgtgaacattcgcctgcctgagtcctgatttggctgcactgggtggagggctttgcttttcttcctgtccagactcctcctcgccctgcccatctcccttggtgcctcaggctacaatctggtatagtttcggctgcacacacacactatcttggcacccatcctctcttaggacggaccccaaaggcctatcccagacagaaaaactgggcactctctcattgcttagttcagtgacctggggccccatgagtccgatatccatgacctcagcaggcctgttcctagcctgtgtcgagatcatcaggaacttccaccagcctccccaagacccagccagccctaccccagtgcatgtccaggctgtggcctaagtgcagggatgcccaggctgcggcccaagtgcagggatgtccaggctgcggcccaagtgcagggatgtccagcctgcggcccaagtgcagggatgtccaggctgcagcccaagtgcagggaagcagcactgagcacatttcacattcacccaaactctgagtcctcccaggcacttaggacttctgccgtccctgatttccaaggctatagaggacatttggaatgttctggtgcaaatatttcaccatcagccagccctgggtcagccgccacgcgtgacggcttcaccggctgtccccaggcttgcaaggcacaggcagctccttccctagttcccttagggcaggaccacccggcgcatcctcaggtggctgtgggagccagggtgggtgagccagggtgtgtcgggctgtgccatcccatcagaaatgttggccccaaaggagcctggtaggatcccatcctctggagcctctgacatcgagtgatggcagctgggctcagggcagagtggaggcagcgtctcccgggcaggggtggcagccgggccttctgggcccctgagcaccctcggtgcccattgatgcccgagtccccggcgctccctgagctgtacacactgggtggggcacgtgctgcagaggttgacgctgcgttgtctcctttaggtgacggtgacgttgtaaataatatgtatgagcccaaccgggacctgctggccagccacagcgcggaggacgaggccgaggacagtgccatgtcgcccatccccgtggggccaccgtcccccttccccaccagcgaggacttcacccccaaggagggctcgccgtacgaggcccctgtctacattcctgaagacattccgatcccagcagacttcgagctccgagagtcctccatcccaggggctggcctgggggtctgggccaagaggaagatggaagccggggagaggctgggcccctgcgtggtggtgccccgggcggcggcaaaggagacagacttcggatgggaggtgagcgatcgcgcctgagtatgattgatcacggccatttatcttgtgttcaatctatttataaagccgggctgagcagccactgcccgaggcgggaggcgcggccagagagagcgttcaaatgtcacatttcccagcctattttatcctgcagctcgcctgatgcgactcagaaagcatcagaggtcctcgtgggtgcctgtcagccctgtaggccacgcccactctctcccggaaatgtgtctttcatgagctcatgtcttaaaacatcccgtgcttcccgccggatcccaggcgcgaacactgccatcgcggcagggcagggagattaataggaagtcccagaacaggcagctgcactccagggcttcattccaggccagggcagtgtggagccgctcacaaatcacacctggtggccacgctgccccggctgccgtcttccccgcctgccccggtcagccagtggcctaagagcagcctcagcttctccaactccaggggcacaggccccgacctgccagggagggatggctggctgtttaaattttcccaccacgacgtgactggccttgagggtctgaagctggcctggtgatcctgctgcaggggtcaggagagagggcgtccctgggacggctctgagagggaagcacccggagtgtcctgcccaggttgtgagggacgctaggccccggtgttggggtcccttgagtggtcctagggggactaacagccccacccccccacaaaaagtgcacttcctggtgggccctggcccttctgccggcctcacgcagccaattgtcggtggtatttttggcagggcccctgcctgggtggaaaatgggaacaccagtcggattccccctgtgcctcccagcctctggagtgcccggatggaggtgggctcctcatgggcaaatggcctgagcagggaagaggatccccagacgggtgggggcagggtcctgtgtcttgcccacctgctctcctggtggctcgtggctctggagaagtccccagccaggtccatgctcactgtcaggcctgccccaactcagacaggccgtggggaggttcctgtggcctccagcagcccttgagcacctccccgggctggcggcattaagagccctttgtaagaacaccgacggcctggggaccagaggctgccccgcacgctgcagagctgagtgcatcctccctgggcaaggagaccagggcaccttggcagctcccagcaggcagatgtggtccttggtagctcacagagtcctgtgtggctccttgtcaaggatatagggagactcaggagctactccctgagtgtcagcttaaagccccccagccctttacagagctgtgggggtcccggtgcctgaagaaacgtgcggcagagtctgcggccgtcaagcagggtggaagctgcagctctacgggcagcccctgtggaacgggcgtacccccccaacgagaggcagaggacagtgtgtgtgggcccaaggtcgggtcaccttcgggagagactggccagggccaggggccccagtgaagcaggacagggagagagtttggagtcgaagacctcagtggagacactgcccagcttcatggccctacaggaccctcatgggaccaaggagagcatttttctagcaatattcatctttggctgtgcagtgaaagtaactttggcagaagtggcctgtccctccctgcctggtgtgtgggaggggaattcaagggtgtttgtccgtcacacttagaaaggtctggactgtgtaatcaggaggtggcttgtggatgtgagaggtccaggggccctgcaggtagcactttggatgaccttcaggtgactttgttcttgtctactctgatacaagtttctatttgctttttttttaaagaaatggcccgtatcaccatgtccgcgtggtgccaggcccagcgcagactgcgccactgcctgccggtgcctgttgactttgtggtgtgtttatcccgggtgtgtgtgtacgtgagggaacgcgctctcctcacggcgcacctcccgtttctgcggagggctttgttccacggtggccacctgacagatacccctcctgccggcgcttagaaatatttactctccccccgacgccctcaaacggtgctccccgcgcacccggcaggatctcgcctgaccttgttttccttgcgagttcgggcaccgactccctggctttgggaccacctttgagttttgttgcttctatcagatgggacggggggcagccatgtgcgtcggtgccttcgggagctgacattggaactgggcaggaagccaccacctcctctgagaaggagagagaggaggaagcagggggcgggaattaagtggcagccacctctgcctgaaatgaatgatgtccgtcaatcaaggaggtttctccccacctccagccacctcagttggggcctttgggcaggaaaactgacatcttacccttaagcagccttcccagaattttccacctgtcccgaaagagctgattgctatttccccctggtttttgccttccctgaggtggccccggagggagaagtgacttgcgggtgactccttctctgaggacttcttcctcttgccgactgcctggcctgtcttccaagtgccgtgaacaggggcctgagacgggacgggaacaccaggcttcagggctgggatccctctgtagttccagacacgagaaggaccttctgctgagtccccttcccaagccactcacaccaacaagcggccctgctagcccttctcctccatgcccctgcagtgagctcggccagagcaggcctggtacagagaaaaacatgggtgccagcatcacaccagggggatcccaagtcaggcctgggacagagaaaaacatgggtgccagcgtcacgccagggggatcccaagtcaggcctgggacagagaaaaacatgggtgccagcgtcacgccagcaagatcccaggtcaggcctgggacaacccatgcgtgcgtgtcgtctctgatggtcctgaatttcatatgtataattgttcactttcacactggtaattaagtgttatgaatcagagtgatttgactttactgtaatgtccacggtatttatttactgaaaaagaacaagtaaagatattttagtaaagataacaagcaaaatccaagaaggatcggtgtcattttggcctccctccgtgctggcctagagcacggtgttgtggccactctgagctcagaagtgggattcccctggaggagagggggtctgggagtggcgtgagcaaagggatctcaccaggcagcagcccctgcaggaacagggtgcgcgtctcttgaaggataggtttgaaataaaagtcacgtggattattcttactgtcattttgggacaccatggaaaccattttctttctactctgagaacaaagttcttgttctggagaattcagttgaaataaaatgagaaggtccaatttcctttctctttgtatagcaagagacacagtgccaggcaaccctcggctttgggatgactggggagggtcaggggctcttctctccctgacatggggccgatgtagatgacagcatgactccctggggatgagagatggggcgggcagcacgtgaggcacccacgagctttgggttcaaggtcgtggggcagccttacttcaaggtcgtggggcagcgttacttcaaggtcgtggggcagccttacttcaaggtcgtggggcagccttacttcaaggtcgtggggcagccttacttcaaggtcgtggggcagccttactttaagtgggagctttccgttagcaacgcaggaatgaggctgggggtcgggagctgagtttcctccggcctcagttgctggtcggaagcctgcattccttctacgctgaggctgacgcttttgggagggccgccccctcctctctccctcctgtgtgttaggaatagtcgctgactaaacccgctttgttcctgggtgctgcgaggcatcctgagctgtgccctgagtcagatgccccacccccgacctgggggctcactctgtgcatggctgtgtgtgtgccccaggggtgtgtggaaacggccccctgggcttcatctcagggagggggcttgtcaggaagtgcacccgaaattcctggcctcctccatctggacacagccgggctcagtctcttcccaaataccacgccccgccggtcgccgccgaagcccacctgcctggaggaaatcacccgtgagcgcatttgctcgccgtggggtctgcaaaaacaatgattttcacatttgttgagtaaatcatgacatttatcatcatgctgtttattttgctaattaagaggcggctgcccggtgacagcccagagggaggaggccatgggtgaggcactggggaggccacctgcccccggctgggccttcagctgtgtgtccagggtcctgcagcttggggcctgctggggcgggatcccgcaggacccccaggggaggcactgggggcactttgctcactgcatcagccactgtctcccacccaaggtctgcttgtttctttgttgactgtgtctccccagaaaggctctcgaaggcatcagcggccctgcctgtaatcagaacgctgatgagtaagtgcctctgcctctgctgaagaggccaggtgaaaaatgttaatgtgaattgatggggtttcaattatttgaagaatgtgctgaagtggacgacctcacccctggcgttatttactgaatattaatgtgtgttcatttgttcaatcaacaaatgcactgtatctgggccagggcctgtgggaagctctggggtcagcccagaggccttgggccacaccaattctctggcactgccatcatgggacccccaagccggtgcctcctgggtccccagagcccactgagagcctttggcagggccaggacctgccagtctcccctgtggaccaggagctacacagcagccagggatgggtgagagcaagtagagcctgcactctgagaagatgagaaatgtcctcacatgtaatatggaattttatccaaaacacccagccttgaagaaaggcaggatttccaaggaagtaaaacctcttctgtggacacaggcctgtccccctacatgtgtttggaatactgatgctcttctgttcctgagtgggagaaatgagaaatacatttgcaggtccattttggtcccaggtgataggatgacgatggagtggggtgagggcagcccagccaggcacctggctccctgggacagcaggagggacagtgctatggggcttcagtctccgacatcacagcacaaatgtccatgattggcttttaaaggcaccgtgaggcaggcgtaaaaaggtagcacccagaaccagcttccccacataccaggaagcactggagggccccaagtgctgagacccggttcagtccgatggcaggaggggcaatggcaaatttactccagggtttttgcaatgtggccaggtccacagggtagggtagggaatcacccaggccaccctttcccacacacaaaccccagtcccttctcccttcctcctgaatgtcctgtcagcagcaaatattaacatgatttgctgcaggagattgtgtgtgagcttgcacacacaaatagcccccacagcttaatttttgcctaaagtcctagacagagccttggcctctaaggatggggatcatccgtgtcgccagctcatctgggctcggtagcttttggagctggctgtcttggggcatgcgggttgggtgcctgcaggccttgcttctctgggagttccggctgggttttgagccagaagatcctggagagacacttccaggctctggattaatgaccaggctcagggtgttaggaggagaccctaaggagtcagcccctacatccagacctcatgctctggcctgctcatgttccaattgggcaatctcttcatgagggatgtgggttcaggactgggtttggggaagtaggaggtcctattggaggctctgcctttctaccgttttcatggcagtgggcggggcttggtgctggtgtaggagctggacttagacccctccgtcggtcctgggctggggaatcaaggtgagcttggccacaggtctgagcccaggcagaagcgaccctgttttaaccaagccccagctcctgcccaggagggattgtcgaggctcctgggactctgcttcagtccctttcagtccctgtggcccatgagcaaacaggaaaccaagatcaacccagagacagacacacccggctgccttgttgccataaagaccctcggtgctcaaagtgtggtccctgagccagcagtgctggcctccctgcaggtttgttggaaatgaagaaccttggcccctctctgggactcactgagtcaccacctgcaattgagcgagatccctggtgattcatgtgcacagctgagtttaggaaggacccggccagacagcgagtacccagcagtcacagcggccagacggcgagtacccagcagacacagcggccagatggtgagtactgagcagacgcagcggccagacggcgagtacccagcagacacagcggccagacgacgagtacccagcagacgcagcggcttaccagggggcagctttgggtgtgttgcaggcattgggagagtcaccaatgttccctgacgctgtggaaggatgcactgccttcctgcccgtcccgcctccagggctgacctcctgaggcttcgggctcctgcccggccccccaaggggatggagcggcagctcccaccagtgccaggtctagccattcctaggagatctccaggctgcctcatggctctgggattcaggaagaaggggcacctgccagccaccagaggctggtttgaacccagaagtgtttgacatagctctcctctgtagaagcagaacttgtgtgtccagcgcccactgctcagtgggctgggtgctccctttgcacccctggagctgtccacagccatggacctccgcactctccatcccatccggctctgggggaccccaggatggcaggcaaggaaggctcaacccagggagctcctgtggctcagacatattctgagaagtgcgcccacccagccggggaggaggtgcaagcccctgccccccaacaatgtctgctgaatgcataggaaaatgtaagagtgagtgcccctcccacatgtcggtctgtactgggggagggggtggtcaggaaagctcccaagtccttcccgggtgcctgagacctgagggcagaggctgggggctgcgggctccccttcactgtgtgttcgtgttgcctggggagcatgggaaatacaggtgtcaggcctgccttggagatgctgggctggggccagggagggtgaccaacctccctgtttgcccaggaacgtcccagtgtcagacccaaagtcctggcacacccctctggcatcaggcatgtgaaagctcccaggagatcctaatttacggcctgggccgagagcagctgacctagataggaggagtggagagcccgcctgcatgtcctgtccggcacctgcaccagaccgccgggcaagggacaggtgggagggctgaggaacaagggctcccaaagcactcgtctggccttctgcaacgctcagtgcacactggggggctatttaggatggttgttgagggcatttagtcactcagcagacaaccggctcatctcaggtcctgcagaggtgttcactggtacctccctgtgcagggcgcttccttctgtctctcccatgcccctttcaccctggagctgagccccgccataagccctccttgctggcctgctgtgggggcagccggcgctcattggctgagctcttagatcaccctattacgccttatcctttaaattccaacagaggggaaggggtagaccatggcaggtgctggggacctcggctcaggctggagtctcagggagggaggctggggcaggtctgataatatcaaggctggactctgcggcaactggccactgtctccccaccacacgccaccgtctccccaccacacgccaccgtctccccaccacacgccaccgtctccccgccacacgccaccgtctccccgccacatgccaccgtctgatcgccacacgccatcgtctccccgccacacgccaccgtctccccgccacacgccaccgtctgatcgccacacattagggcttggtattctcagtcccacgttttatcatctaaacgccaaaactcgttcctggcctgccctttctctccaaggttcccagatgcacgctccactgcccacaccacccccacggttgagtgggctcggccccgggacgtggcctggctctgggcacctctgctgctccactctgcgtggagagttctgcgtgaggccaggaagctttgccgcgcttccccactcaggagcttctggatgtttctatggaggcctcacgtctaaaaccgtgagcgcaccggccagtggatgctctgaggagtgttcccgtggagccagcaccgggcagctcggcgaggcacacagcgtcgggatttggagagagacggggccctgtgggatggtgcggagcctgaggccaccgtggggacagggatgcagagaaacccatgggcctcggcgttgctccgggagaagccggcagtgccgtggaggagtcacagcacaggcttcccatgtcccccggcaccgtgacatcagccctagacgtttttagcccaagaatgccatgaaatcctgcactatcttcggcccggctcggaggcacgggtatataaggaattttagaaaaaaggagagagaatgactaagaatacctccctgatggctctcctttacttccttaaggggtaataactccgctgcagcccagcagaggggactttctttaaatagagcattctgattcacaagcgaaaaaggaaataaatattttcttttcatattcgagagacatctgtgaataccaacttcttaaatagtattttgccaatcgcatcccacacgccccgccccccctgtcccagtgacacccagagcccacccttactcaggaaccggccgcttgtaccaagagacctgaaaacatcatcagggctgccagcctgaaaatgtcttcagggttttgccagaagcaggagggagaagggcttctgcgtgggggcgtggcccagcctccccctaggtcccccaaggctccctgtgagaacagggtgctccggagcctcctgcccttttccttcctccctttctttcttccttagggaaaataaggattggatgtgaagggagtatgacagaggcatgtggcctctgtatgggcctggtgggcacctgccgtgtgccctggtctctgtgaggctctgtctacactgggaccctcccagctgtgctgtgattaggacacagccaccctcgctctgacaggggaacccggggctgagaaggaaggaatagctcccagcccccaggtttgtccatgcaggggcccagaggcaggtgtgggtcccgctcagtgaccccagcaggagctcactgggggcagccaggctcttgccaggtgggagaggcacaggtgagctccagcaggggcggcagctgggcccagacccggttcctgcccccactaacagcatgtaggtggggcagtctcaactctgcgccttgcaggccgattgcctgggcccagtgcctcatgctcctgcctgaacatggctctgtcctctgcaggtccctgacccagccgggccctggaacttgacttcactacagccgatggccctctctgggcttgggggaattctgtgtcgtaaacatgacctcagccccactttttctcagaagctgctgtccccttgtttgaaagcaggtcccaaatgtagacccatgggcccttgtggggcctgagaatgctggggacacttggcagagagtgaggctcaccgcccggtgcccctgcctgaagctgggattctgcggtggccccagggtgcccgtggcaccagagaggggttcagccaggaaccgcaggggttcctgacccagatggtcagcctgtgagacccccacccaattccaggccacattctctacctactactggctgagagttcccgggggaggtcccaggagtctgcattctgagaagcgatcattgtggggcacttggaggagtccagcccaggaggaggccctgggaaaggggcccgccctgaacttccttcctcccctacccatgggagcccagagaggcttttcctaaaggtgccgaggctgacgggtagcagcagagcctttcctgaccacaggcctcagcagggcaggtggaaggagcagaagctggagctgcgaagaggcgggtgcctgggtccactgggggaccccactgttgcccaggggggtctgtgcagccgctgaggctggggggtgagcttcacaccactggctcatcagcatggctcctgtccccggccacagctgcacgaggcggcccgaggctgaccagccacgcgcccccgggcatggagtgatggctaagataggaggggccccttgtcatacctgagtcccccttgggacatcaccatctcctccccctcccagtgcagttatgaactgggccccagggagggaaagagtcatatgcgaccatgggctgggtggacccaggacaagagcccagggtcccgacccccaggcgggccctttctgcccctgcagctcccagatgtcagctgtgagcagggcaggcccctccttcctgtgtgcccccagccatcacagcggccccagctcgtcgtgggcactcagtccaattgtcccttgggtgatcctacagccttggcatcctagaggagcgtgccccatgagccaggcagggctggcacaggcctgagaggcagctcattcacctctggtgcctgcacctgcagtgcggtccctgcaaggctgtgccgggatcagctttgtgctgccaggcggtaggcctacgagggcggcaggaagcaactggaccactaagactgaagaatctacagtacagatcatttgcgcttgagatcttttaattttgagtaatttcccagcagcaggcttcgcagggagcagaatgggtggggagggcggcccctcctgagggtgggcggctgtggcctggcggctccctggagaggccccctgaggcctgtgggccagctcctgggtggccctccctcccctgggtcagacgcaggtcccacgcgttccaggccacagaggtctccctgggtcagggacgagggtcaggggatgagcgcgtgaacctcgcactcctcagggggcagtggcaggtcccactgccctcccgccaggcctgctgctggtcagagcttctcctgtggcaggaattctcatgggccgggtcatcagctggggtaggaatgtgctctcagggtgctacgggccaccttggcctcaaccagagatgagggtgacgcaactgctcacaggcccgctgaggggcagcgacctgaggacaactcctgtgggctgcctgtctctgctgcctcctgcacgcgggtagaatctgctcgggtcaggggcgggcactccatgcgttctctggacccccgagctgcagtgtggctgggttgctgtggttgaaggcacctgccttaaggggccaggtcggcgcagggcagcgtctctctggggtgaggagtttatctgagtgccttagagaaggccctttggagaatggctgcaagccggcacccttgctgcatggagggtttgttctgcgtggccttggctgggcctttcctgtcgtttgggacatatgtgagtagaattgcctcaaagtgactattctcactcagctgccaggatgccgtgagtgtgtctgctgtgcaggggagcgtggtctcttcttgcttttgcagctccgggcccacctggagtgcttggcgtggcactgggccgtggccttctgggacgcgtgggcagcaccaccgtgctttccagggagctggcttggtgagtgggccccactctcccctgctgcatgaagaacggcaccagcctccagcagcagccgcccaggagctctcgtgcatccactctggtcctccggtcccggctgcgcctcttgcaccaggctggggcagggattaccagccgcacgcaggctgcgggaaccccctttgtctggctttcggcggagtcggcagagttccttccttctgggctaatgcccagtttaattgtacatcccattgtgtcgtctctgttcaatcatgttcaaaaatacctacgtccactccgttcccatttagatctctctaaagtccattccggcttatcagcaccgtaatttcacgagcagagctaagatttctgccatttaggccccaggcattgtctgtcgcggcagcagctgagataaaccctcacccagaacaaagtcgaaatgaccttttacaagtagaagcggccttgtttccctctagactaatttatcagccttcgtttcagccctggcgctcagcggaggctggagagagtgctgtgcggggtggcggcagagggggattaggatgcttgcttgctccacagtttcaacaggcacctctggatcctcggggacagaagctgccaatggccatggggtgccgccgaggagcttgcctgtgggcggagagccatagccaggtgtcccccaaagagcggtgggggtctcagggcctggggcaggggcacaaaaataaaaccttgtgtgaaaacaacgagccaggctggaaatacgtgaacataagcaacatgaaatggccgggcctccggagccccttgccagtggggctctgctgagcttcttggtaacagctcacatgttccacctacagaggctggctggctcagtcctccccttcctgcccaccccaggaacaagaatctctaggcagaaagaagggaggagaggctgctcaggctcctgggtcagccaaagtcccatttctagaaggttccagttgccctggctcctggagctaggtttgcactggagctgccgggccccctcaaagcatcctcatcccatggggtgggcctctgatgagcctctctagtgcatgaagaatcgctgggggctgagaagcgcaagtcttgctcggctaggagccccagctgcactcgagccccaaggggccctccgggacaggacgccactctgctggcccttgatgcctcccacatggacacgagcaccatgctgtcttcccggagagaccacggtgcaccctgtctcaagtctgagctctcagaggtgaccctgcccctcaagggctccaggacagctgtgcagtgatcccaggacagggatgtccttgtgttccgtctctctccccccaccaggggaatgcagaggctacaggcctcccagggtcttgctggggaagggacctcacttcctcctggtgcacatgggtgaatgctgagatatcagactggaggtaaacatgggaccttcttcattgtatcccagtgcagaggctgaggctcacctgtctttccagtagaggcaacaatccccgtgatgactgcccagggcctgaggggcagagactctcctcacagccgctgagtcaagggcctggggagaggggcctgggggtctggcctgccggccgaggctgccctggatgggggctgaagcctgcacaccggcagaaaaccacaggctctaccgaggcccttagccggggccctcctttaggcttaaggtggattttttttttattttttattttttgagatggagtcttgctctgctgcccaggctggagtgcaatggtgctatctccgctcactgcaagctccgcctcccgggttcacgccattctcctgcctcagcctcccgagtagctgggactacaggcgcccgccaccacgcctggctaattttttgtatttttagtagagacggggtttcaccgtgttagccaggatggtctcgatcttctgaccctgtgatctgcccgcctcggcctcccgaagtgctgggattacaggcgtgagccaccgcgcccagcctaaggtggattttaaaacagcctgggagtcctgcgtgggatctgaagaacaaataaagtatccccggcacgcgtggccctcctggaaatgcagagagtgctgcttgtcctaccttccgccaagtggacagggcttgggggtcatggggcgagtgtctcctgcacctaatcccagcctccaccccgatgatgctgcctgtggactcagcacagagcttcagacctgaccacgggcacagaagacgaggacaagagccgaaccgggggcagaggaggaagagaggaggaagaggagcaggaaggaggaaggagagagaagagggagaagaggaggaggaagaggagggggaggaaggggaagaggaggaggacagctgagagctgtgagtccagggtcaacccttagccggagtggggactccggggaaggccagctgcccaaatgactgaagtctgatggcagaaggacatcaggacccctgagttttgggagcatagaccacgctgccttcttttgaggaggacagggatggaaaaaggggtctgggctgcattttgataaaagccttcaaactccattcatatgatcataggagctggggggctggagacaaatgtatttctcttgcctctaaaattcgctttgtcatgggatttaaaattacttcaattgcactgacttgaagctcgcacagagatgaacaagatgcagcctcggcgctcagaggcgggtgtccagtccccagagaggtggccttcaagtccagtagcccaagccacgggagccagcctcaccctggccccacaccagagctcccaccgcagggcccagcctcctgctcactgggatattccctcatgagacctgggcccttgcagtcatcaggaatgatgtcagctgtggggaggacaggagggccacccggggcagctgccctctgagggactttttgcccctgagcatggcctcgggggctgggagccccggctctgacgtttctccagtgacccctggcaggtcggggaccccagccacttccagcacctgcagggcaggacctccccgcttggatgctggtgacacattcttcagctggagccgagtagggtcgtgtctgccccgcttccacgcgagccctctcccacctggcctctgtttctacctcgggttggtgtctcccgcccacttctgtgtccactgcagagcctgcggcttcccagatcccacatgagcttaggcgctgactccacctctcggagggacctccaagtggagccttcgagcaaggggtccagctcctgtaggtttcttgcttcagtggtgcccgtacataatagtgggtcccacacgtccatgaggcaggggacgccctcacagtggagaggtccccactgccttctgaggttaggagggctttccacctgcctcaggagggaaagcacatccaggaagcagcgccaaagtccttggagacacccccgaaggtgtgcaaagggcagcctggccttgccccttcacccgcatgacctcatggtagactttcatcatcttggcattacatgaggggaaactgagtctgggaaacagcacacggtgctgctgatggagcagctgggaccaggacgtcagatgtcagctgcagactggagggcctcctgcttcccccatcttcagggagcaggtgcatccttcatgctgggggagtctgggggaggctggggaagcctaggggaggctgggggaggctgggggaacttggctgccctgtggggcccctgtgcactgggctttgctgagaggcagggatgggtcagggctcagtccccttggtcacaggcgacttcagaatcctaggagagcagacacctgctcgagcctaagtaggccttttgcatttttgctctctggctgcgctgcccatgtccccttaagggtctgcaggtgaaggatggtgtgtgccgtctaaaggtgagggatggtgtgtgccttctgcatgctcctgattcctccttttcaacctcagtagctttgtgaggttttcgaaaagcgatgtgcaggtttttgagatgcctgcatcacagagccggggccctggcaccacagaaagaggaggacggctcaggctcaggctcacagatgctgctgagaccttgagcaagccatcgtggcctctgggcctcagtttccccacctgctaaatgaggaactaagagaggcatcttgctggccccacccaactccagcctgtggtctgagtactctgatagccaagaggtgcagagacgaagaacgtggcggttggtgtgggggaaggagttttctttgacggaatctgaagaaagtggataattttccactggtcgtacccttgcccccagcctggaagctgtgttctcccgaactggcattcttcatccccgatgaatttgctgtcatgtggggtcaccaagataaagcagggcaattgcacaccacccccaaccccgggctgaggtggaaaagccactctctgagaacctcgtcgtctgttgctttgctgattttctcaaagaagttaggctatgggtggtggggggccagggctttggcggtcatccttgagatggttgcgtcccacgccacaggtggatttagtgaatgatgaggcactctgagaaagttaccttgccacccacacaaccgttgagttctcattctatgtttgtgttctaataacccagcttaggtgaatgaagagtgaaaagtacctggcacactgctgtgactgagaggcaggtgcttatgagcccgtattagggccgtaggggcgctgccgcaaggtgccatgtgctgcatggcctgcctatgagatggcaggtccggaggccagaagcccctgatggaggtgttggcctcactcccgcagaagcctctggggtggggtccgtgcgtttctctccccgggggggccagggtgtggtgcagatcttccccatgctttggcttgcagacacggtgccctcgaggcctctggctttatcttcacgtggctccttcctgcgtgtgtgtctgtgtccacatgtcccctttgggtaaagatattagtcatattggattcggaccaccctacctgcgttaactcatcacatctcccaagaccctgtttccaactcaggccgcgttctcaggtcctggaggtgaaggcttcagcaggtgaattcggggggggcacaatttacatagatcccttagacatcaactatctgggcctgggcatttccaggtatagcaggtgacagaaggcggtgccccagtgcacacctggtccccacgtccctgaagcaaatgctggcacctgagacctcccagacaggccccctctgcggactcgaaggggaccacaccgggattaggaagggaggtgtataggtccagaagtgattagaactcagggccagtgacatatgaacggtggtgccaacccacgtcttaacagtaagatgcctttttaaggccggcgtttttagccaattccagtattttccatttggagataatgttagtgaaataaacatcagagcagacttggccgctcacagatacccgtgcccctgtagtgtgtgtgggtgtgacttccacagatgaaacgtctgtgtggggggagggcagtggaaattggggtaactgtggaccccgcctgctccccgcagggctcctacaactttcagacagaaaaaaaaattgatttggaggtaaaacgacgtcatgtgaacatttcaaacatgggaaggaatcccacactgatccctacagtttctagagagggaaccttaccgtcccagagacacacaccctcctggaagagcagaggccaccagggaagtctccgaattccttctagccctgcccctgtcccaggggagcccgtggctccgtttctgaaccagtgtgtgggtgaggttttgggaatgccaatagctcggctgctccgttatttgtagtttttaaagtcttctttgaggatggtgcaggctttcagaagccaggccgacagcctgactttgcgtgtacgtagacgtgtgaccacgatcgtgtgttctgtctttggcccgaccggccctgggtttgtgaacctgcggctgtgggttgctcacccttgaaggcccttgggagtgaaattcaaaaacgaaatggttaaaaaatgggcgggcaggcaggaaaggagtggagggataggagcccagcggttggctaattggagagtgggacccccgttggggggggccctcgccgggacaatgtgctccgaacggggagctgggaaggccccgcgggattgttatcgaattagttgaagtcagaagtcccctgaatggggtaaagaagggaaggggaaacgcaggcccgggtataatgcggcctaaatgagggccccattcactgcccgtgaaaggctcccgtccccttcccgggaagggtgggcaagttcacttttgtttggtgggggcggggctgctctcagagtatgttcttacctagagccggggggccaggggcagaaggggaagggggcattggaaataatcccccgacgggcagcaggaatggtgcagccacagggcacccaccggaacccccaaggcgccttctgagctccctcggccccaagttcaccagagcacccaccccgccggggagaccgcccctcgtcagccatccggtcactccacttacacccgggaaaatgccgagatgtaagatgtgcctgtgtggccagctgcataggaaagaaatgtatcctaatggctgaattagaaaaaaatgttattggaaggaggagagaaacccatgaaatacagaaatggaccagccagaaacccaaaaggccaggaaaacagaggtggggggcagggcacagcaggttacataggaaaataaatacttaacaaagtgctgtgctcagtaaatatttgttgaattcatacattaattaattttccagatgagattttcctaatccattttttaaagaaaataaggattaagaaggaagtggaatctggttatgagggcgggctcggtggaggtaaagggaaggtggtatgtgtgaggttgggggctgggcagtccaggggcaaggctagaaccggcttcctggccaggcctcggtaattgccccaggggcagctgatctgagttcaagttgcatcccctgcctcttcacccacctcccaaccctgaagccggtgcagcggcatggactggatggaaccacctgaatctccggatcccacacaattaaccctctcccagggatctgaatgccgaaggagcccccagccccctgccctgactcagggagttgcagaaaacagcagcgcgccccagcgctgccctcccagctgtgtgtgagcgagaccggggctaacagccccctacctgcgttccccatgaccggtgctcacaacagaggtgccccaactagtactggtgcccccgttttctcagcaagtccccttgtcggaggccacagagctggggtgaacctactctgggagaaccaacaccccacactaagccagtggcccacactgacctggccaggccactcctctggagatcctccctgtgaaccacccacagagggccctttcccagagagaccaccagtgggcctggacccacgcccttggggatgagcaagctctcgtgtatttgctgtgtgtgcaacacggggttcctctcggggcactggggatcccgaaagcgtgtctggtgcagaaggcgtgacctccaggcagctccgagacgggaagtgattggagtgtaggcgtgaggtcccggtgctggatagacgcacacgccttcacgcatcctcagaaagtgatgttgctgagtgaatagaaggtgcacgtggcccttcctgagtctgctcaccctccggacacacacgcatgccttcccacgctcctgtgcacacacccctcccggcccttccatggaggacctgtaggaacccgtggcctagggtgagctgggtctgaggctttgggacccgtgcctggaccagtagcttcccagatgtggcatctgagcaagaggggcagagcgaggctggcatgacaaagagtgagccaccccatgaaatgggcccggcaaggtcacacggcaccagctggcccaaggctggtcaagaatccgagttttctgcagagggagacacagcctgacacctgggacctgtgcagctgggtggagtagaaagggatgaaaggaggaggggcggtcggcccaggaagcagggcgggcagacggcgacccaggggacctgtccgagaggtgacatagaggacagcaatgccgcccgcatgtccccacatggacctgcttccaggaaggtggaaaaggcccatgggatgcagagcagaggagacacagctgtggcttagtcaagaaggatggtgtcctggtgcggggagctttggggggcgccttctcacggtgccaacccgccagccccgccctttgccatctctgaaagcgctacccagaaaacctcctagcccagcgccattgatccctttttatgacttggaaataaattcgcagctacaaaacccgaggtcatttggttaattccactgccgagctccccacggcgcatacccccggatgcttcggcccagccaggttccttgctaagggcaagttttacgaccttgggaacattggcatttgtttatggcagagaagtgaagttttgcttcccccagaggccagagtgtttccacggacggttttaaaggggaagcaggcacatttgtgactaagtcaccaggcaggcgtgatacaggagacaatgctctttggagctgcccacgtggcggcagcagccagaggtccctttgcccagttctctggcctcttcttgccctgtgcacacctgtcacctgagacacccgtacttggcattcgctcttcaaacaggcattctgtgaaagtaacggtccctgcgtgctggggacgccggccttggccacgtgctggctgtggtctcccgggagctgaggaaaggagttccgcctcgcagaatgaggcaggattctcctcttccatccccctctctagagtcagaattaccccaataattgcgctcatctgactccaaggccgtctccagagtttcgagtgtgaaatagagtagctgtctctcaccaaggctgtcacagttctcaggaaccagaggagaaggcaggaagcccccgacccctggagcaaacccctgggtcttcataaagcagctgctggcacagcggctgagaaacccaggcgtggaccctagcccggccgcctgtccgcgtggcatcctgaagaaatcactgcatcttcctgtgccttggtttgctcatctgcgagagtcccggcctccctaggctgttccagggatcatgggggcctctgcatgggaaagcccaagccagcacctgccccggcacctctgcatccacatggcagctccgtctacagcccgagggccccataaccagccagagtggccacgcttgaagcctcacggggctccagatggagcctccctgacaaggggacctcttcttcccgggatcttgttccgacctttgcttaaagcagtttccccactggctcggttcacgtgcgggcagcgattctctggccctgcactgtagggtgtttagtgtgcccgaggccaccccgagtgatgacgacgattgaaaatgtctccagaggcctgactcggtgactcacgcctgtaatcccagcactttggcaggccaaggagggtggatcacgaggtcaggagttcgagatcagcctgaccaatatggtgagacgatgtctctactaaaaatacaaaaattagctggacgtggtggtgggcacctgtaatcccagctacttgggaggctgaggcagaagaatcgcttgaacccaggaggcagaagttgcagtgagctgaggtcacgtgactgcactccaacctggtgacagagcaagactccgtctcaaaaaaaaaaaaaagaaaagaaaagaaaagaaaagaaagtgtctccagatatctccgccaggtgtctgcctgggcagcagagttgctgtaatggagagccactggtcaaaggtatgggccaccatcccctttgtggggtttgtcctttggaaccatctccaccccctgaagccatctcctcttgctccctgagtgcctgtccagaggcccccccaggtccccacgagtgggtggaaagtcttggggacagaagaaacctggcttttcccatgaacagatgtccccctcgccacatcaagggagtgacttgctccgtctgtcatgtagtgaccacctgcttctcagcaggtggctgggacttaactctcaagggtatttagggacagagagcagtgggaattcagaaggagctcagaagggaatgccctgtgccaacctaaacctggggcagggtggacagcaggtggctttgaatatcctagtcaaaaatatgggaacattttggttccaggggtaagaaaaaattaatcatttatttggtaaaggcccatgactgagtggaaaagcaacaagaagagaaggacaggaaataaatctcagagtgggatttactaagcacggtcacgctgaacagtaactgtgggcagggacagcactgcacgtttgacatcggggcacgcagctccgacgtggccggtcccgactggcacacctgccccgagtcacctgggacggactgcagccagccagctctcccttcttcctggggaggcctgtgaaggtcgcgtgaatgcctgtgtcccccgggacagccagggaggcaggaggccaggcctgggtgtggaataggcctcgctgggaggccgtggttctgctcctgcacatttccaaaggaagctccctgtgggtgcgcgtggaagctgagcgcctcagtggaatgtcctggaacctcacttcgggatcctttgtcgagaccaattggccacaaatgccacctcctgcttctggagaggtttagttgtcaacggccaccaggaaccacagccctcccgccccccacagagccccttccctgagggttgggccaggaacttgtcttgtagtttcctgagcacgacagccaggacttggtccagcgttttccaaactggcagaacccggggatctaagacgggcatgctggaaaagtagtgacagttatttgcctcctgatctaaggttaacggggacttccaaaaggtgcacctgtgttagccctttcacagaactcttacttaacatggaaaatatcgtagcattttctagagacatttgcaggaaggtatttgacacattaaagccaattttctttctcaactacagaaaatcagtgactactattaacatcttactattaactgtaacccaggtatggatgtctagaacagaaatctattcaataaatattggataattgcagcagcggaaaccagctcgctatgtgccgatgtgttcctgcagctgcttcatgttactctgggcttttagggcagccagcctgcactcacaggcaggtgggctctggtctggctcctgaagctttgcaggatccttgcactaggattcaacatgaaggcagctcgaggcatcactcctgatccagctctgagcatggagatgaggacatgctccctgggatccatggggaaaccaaggccctggaaggctttcccccctcagattcaggaaggagccgcacaggctcagaagccaggctcccagctggaaccacagctgcagacagccctgcccagagcctgtgggcatcatggaagtgtgtgcgtgcacgcgtgtgtctgtgcacgcgtgtgactttcacgtctgattccacttactcaagccacatgcaaaggctgataaaatatttcccagacatgctctaaatagcaggcacatgttctaagttgagggaatcagaattcaagagaatctgtggctgaacttatgtcatgggttcacagggctggaaggggccacccttagcctctagatatgcattagtttattcattcacaagatatacatccacttgttcattcacttatgagatgtttatttctttatccattcatagatatgcatttgttcattcattcgttagatatcgctttgtccacgtattcatgagatatttgtttattcactcattagagatatatctgttcatatatctattaggtatttattcatttatttattcgatatgtatttgttcatccattcatagatatgcatttgtttgtccattcattagatatcgatttgtccacgcattcatgagatatttgtctattcactcattaggcatgtatttgttcatacatttattagtttagatattagatattgatttgtttatgcacacgtgtatacatttgctgatcaattcacccactaggcatctatttcttggtcatttgttcgatgctggttgtctcctccttcattagacatctgcttgtctgtctctgcactcatggacacttgcttgcccacccattgtacacaggtctgttgagagcctgcggtcagcagccaccctgcccttcttccctaagctgtcttggtcacagcgtagccaatgccgattttctttttctaagtagaccgattgaaaataagtgaaagtcatttccgggcagcagtgtccacctgaaagttgagatatgcacagtgttgaccgaacatctctcgtggtgtctggtccagcagtgtgaaaagccgtgggcttgatctagctggagatgcggccgtgggtggactcctaagaaaagactcaaggcagagtctcttggggcccgtcgggggctgcagcagattcgtgtcttgaaaacaggttgggtccagctccctctgctgtgaggtccctgcctcattgctgggacttttgtctcaaggccccggcctcgtccttggtcgtccagcccactggccgcagcagtgggggccggcgctggtggtcagtgctcgctcaccctgccctgcacagcccctaatgttggcacttcacggacaagccggcctgggtcctcagaggagaataaatgtgcacggaacagcacacggtggcccatggccttgcagcacgagcgtgtccatgcgtgtgcacgtgtgcatgcgtgtgcgtgcgcgtgcatccacgcctggcggcctgggcccggcgtgagtgtgtgggtgggagcgggtgtgtatccgcggctgctccattctgctgtaaaggctcgctgcagtgggcaacatggaggagacatgaaagaggggacaataaatagcttcctaccttgcctggataatgggcgagttctccgggtggattaatcctcgcgtcgtctttgggccgtcagtttgggagtgacagtaacaaggctcccggggaccctgctaatttgcactccattcaccggctcgtgaaaccgtcagggctgcggaaggactgcgcggcgcgggcctccattcactgggagcctgatatactgggaaaggggccagtgcgcacaaagcccaaaagagcacatgggtgaggctttgtccctcctctcccgttcccttttatgcggccttgtgctagttaagctcctcatttgtccccgctggggctcggggctctggtcaccctcaggggctgccttttcaggtgatcttgacacccctctggccctggcctgagtgggcggtgggggcagggctgcctgagcgggggcacctttgaattctgggagtccaggcctggagccggccggacgctggcctgcagtagggacagcagaggtggccaaggcccctctctcctcacagcctcctgcctccgtccccatgttctgggcgcctctcagaggtcctggctggacgcctgcaccccagagtctttgaaggtggaatggaggcccccgctcatcctcccggccccctcgctgaggtcctcccgctcatcctcccggccccctcgctgcggtcctcccgctcatcctcccggccccctcgctgcggtcctctctgccactgtggatgggcttcacacaaactgagatggggaggccccatcctcttggttcccaccagcacctgcatttccgccgctacctcggcgtggctctgcctgctccctccctgaccccagctctgccctctccctccagctcagcctcagattttaagtacccacctggcgaggggccctcttccctgctcctggcacagaggccccgagcctttcctttttcatgttgctggtgacccctccccaggtactcgtttaagagctccctggcagcagagctggacacagggaagtcagtgggacctttgtggccacgaaacaggtctcacccagaaaggaaagcggggtcggctcgcccgcctgccgcacgcttccccgggaggccgagctcaggaagacgcggcaaatcccatcctatgtgcttgcagcaactcctctgccaaaaaaggaaatgccaccgccaacagcaacagaaacacagatttggagatccccaaattagccaataaacaccacccattccgtggtgaggggggaaatggagaagaaaccaccttcccaaatctttatgaattaaacatggcatgtccatcaagtcatagagacaaccatttctgcttaatttgctgacacaaatcaccctaactattttgctggggagaggggtgtgggggcgggatggcgggtcctgggcgtctcggctccgccattgtcattaattataaaattgggaggactgtaattttccacttaggcttgtcaccaatcgggcagtcaccccagctgtgcgggtgcccccctgggtttggttgtgcccgtggggggttgctagagagtcctttgtcgcctccctgggggcacagacacctggaactcactctttctccgaggaacaggagcaagtgcggcattctggagggaggtggcacttgtttccatgagatgctccaagctcctcctgttcttacccagcatttccccaggattccaggagactctgcctggcccaggaggttctgctctccccaggcaaggaagcggggtttccgggacaccacgtccaccccaggtcacctacaaacaaggtcagccagggccgtagaccaaggactcccgaggccaagccggtgccttcccaggaggccttgccaccccccattaatcctgcaattccagatcattatcaaggtcactgcctggtacattaactcagaagcacgcgggtgacagggtgtggccagtgcaccaagcagaacggccaggcaagctgcgcccagacacatgtcggagtctcgtgtggccactgggtccgcctcggctggaatctgccatccttctcccaccacagccccgccccttgtctgcaggatgcaggactgcccgggaggctctgcttggccagcaaaaagtgtgtttccttgtaaaaagtttaccagaaaagaggagaaagtagttaatggagaaaatggttttccttttcagacaggcgtcttttccttccattctcctattggacacaaaccagaaacttctagatctgaggagggtctgacacgctgggcaacttccaaccctaacactctgtttctatgcaaaaataatgcctttctcagttcaaatgctgctaggcgacccagggcgatggcggcttttaagagctgatgtccacccaatagcaccgtcagactcgcaggcctcagaactccaagcccttggtcaggtgcggtggctcacatctgtcatcccagcactttgggaggccaagacgggcagatcacctgaggttgggagttcaagaccagcctggccaatgtggcaaaaccctgtctctactaaaaacacaaaaactagctgggtgtggttgtgcacacctgtaatcccaactacttgggaggctgaggcaggagaaatgcttgagctcaggaggcagaggttgcagtgagccgagatacattaccacaatagcatctcgcaggggcaagaatggcttcagctaagttagtatcatcctcagagacagattcttcttattctgaatagtgtgttgggcccctgttgggtgcctggccctgtgctaacatgttccacatcagacgagataccaacacatggggagatggttacaatgagcttgatcttgaccgttggggagctgtggccccaggatgcttctgtggtgaatacagaccttttggctgggcagggcctgagaccctggtgtgataccctgggcatcgtcccccaaaccttcctttcagggccaccgatcttagaggtcaatgccgcagacctgacagtggggacctgtgtgtggggattgtgtggtcagctgatcaaggtattttttcagccaatgggaccgtatccaaacatcatcaaagacaccatcccatctgcttccccatcgctgctgttggtcctgatgtcagtgttgggctcctggatagcctgggttgaggattctatcagaaccaaaaggacatccccaagaagtccactcctactgctaaggaatctgtcattcaataaacaggatcagatggcacagaacagagcggaacccgacctctgtgtggatgatccacaggtgccactgggaccatgtcaggaagaaacagccatgtcgtggaagtgcagccaggccctggggacaggcaaggcccacggggtccaggagaacagggcctccaggagggtcatgggtcccggggacaggcaaggcctattggggtccaggagaacagagcctccaggagggtcatgggtggaggcgggagagagtggtttgtgtggggtggaaaagagtggtgcaggaaggaaggtgggggccctgcctatagagccagcaacctggctgcagccccaccctccctccaccgagcggaccaacccagaaccccacaggggccctgtcctccggggacctgtcgagtcagtgctcctctgcacggtggctccaggccacccctcccttggccctttcccactgggcgtggagggacggccgtggccttcccctgccagcccctgccctcctcctcgggtgcccccacgtcctctggtttcccctcagctctcacaaattctgcccgtgtccgcaccctcattaatcaatgtcaaggcgcggcgtcggcaacaaggggcgcattcttccccggctcctcagcctcatacatcccattgttcccggggccgattcagatggcaagaaaacagcctatgcagcacataaaagagatgaggcaaaaatgaaaagaatcaagggagaaaaaagaggaggcatttttccccctgaaacactcgaataaatactcggcaatgataatttaaattattcatacatttatgaaaacatccattgaaaacccaagtgtatgatgctctttgtctctgtctctgtctcttgtttgggattaatctttactgtaattcgggctggccgtggccccctgacaaaggccacactctctttccatgggaaaaatgtttccacatatcccagcaaggagctggggagagatttgtgctgacgaggcagtgtccaggcccccgagatgctgaaccagccatgttcaagaagcgtccaacccgcagaaagtacagtgggttgtcacagtgctgtcactccagtgacatccatgccacggggctgggaagccagaggggcctccacagagaggagacccacagagcatgcatgctcctgcaggcccctgagcccaccagggaaggagaatccaagagccttccccaatatggcctgcgtggggagacacacccagacacatccccacccaggtctggtgggttggtgggtttcagatgcccccggtggctgtcccccgccgaaccaggcctagttgtcacatcacagctgggcacactcaatgacctgccatagaaggctgaggtgggcatcctagcaggctggagctgggcatcccagagtctccccaaacctggggcaggagtcaggagccacactgtccggaggctgtggttggcctcacgaaatcagagagtctaggcccatgcctgagactggagatgctgaaaccattcttgatattgcagagggcggggctgtggctgtggccatcagcatggaactggaggggacaggttcctgtagccagtcatccgtgactgccatagagttcaggtgcccactgtccgcacctctgtcttcctcagcctcccaggctcctggtccctccctgggccaccactgtctctgacagcctgaagccacccactgggattgcggcagttcctctgtgaattaactcgtagcctagcactgttccatgtccaaatgttgcagggcagcaggggaaacggcaccctctgtgtggatagaagcacgctttctgtgtggtgttttcctccagggctccgtgaccaaagctcattcccaaacaggataaaaagccccgggtggccttctcctcacacacctttcaccgtgaaacgggcattcgcccgtgtgtgagttgatcggcagtgatttctcttccctggaagtgacccagaatccattcctgggcggctggcgtccagctccttagcctgggttagcgctggggatggggcggccacagcagtgggcgcacggcagcttgcaggctgtcagttcagaagacgctgcagcagctgctgggctgccccccagctcttctcggcttatttggtctggaatgggagcagggatctcatgggaacagccctcctggttggatttatggcttctctggtttgggccaggtcagaactcaagaggaaaaccgctcctttctgctccttattccagatgaaagtggatctcaagagtgcctgggagcataaactggcctctgtcgagcttggcagccatgctgagtgcgctggcctaagtctacggcgagggtgaggggttctcccagccactgtggctgagtgcacgctgtccagaagcagcgttttcactcacggccctgctcttcctggggccaggtccccgtgccgtgcatcccggtagatcttttttttcaacacgggagagctcttgagaaactcagcccagttttccttgaggccctgcgagtttcattttgggctggctgggacgcgcgctcttccccctagaagtattcgggatgccgcctgcatgctacctcgctcactcccaactctgctccccacacgaggttttggggtgcccccttggactgctgccaccggcctcttccccctcttgccggccctccctcctctgtcaccgatgttggggtctgggaaggtagccaaatgcaggaggacaccggagcaataaatcacccctcatccaacatctgcaggccctggggcgagcccctcgctgccgcccccatcccatccctcgccacaaaacactattgtcgtggccaagtgaagaagagtcgcctgcacttacaaagggcctctgcagcctggcgtgacggccagaggaggtgcctggctctcggcagggagccgcagggctctttcttcctctctggttcgtacttctcctctctcatgggggtcccccaaagcctttcattccggcttcatattcacataaagacatcaagaaaaaacccagcagaaagaattattaggcatggctgtcaaatgctttatcggagaaggggggagggcagtaacccgttaggtgctggccagcagccccagcttccccaggtatccccagggggcagccggggccacctcggtgtgcgggaacaggccatgacacacttgggcacacccacccactccaaggcacacatacgcacacgtgcacacagatgtgcccgcccgcacaggtgggcatcggtggggcctgtctcttcaccaagttttgaatggctacacctgatctcaaggcccttccttagaaagggatgttctctgccttccttctggctctttctttctttgttccaattagcagaagatgcttcctccccttatccacactggcaggtgcctctgccaccttctacccacgagctggggtcttttctactcttggcagcgaggggtggctgaaatcagatgtgccctggaggccaggcctcaggacgctcctcccccaggtgcacgctcagcggacaaggtggacaacccgaaccacgcttgctcagaaatcccgtaacccagctggcatttttggagacgtgttctccctcttccctgcaaagagctttctcacagctcaccctagacagttttgccacctgccaatcccaatggctttccgaaagttcacagcctggggcccagctctcccaaaggaggggtcctcgcgtccagtgccgggctgagcggagagctgcaggggagaggcgtgttctgcacactgccgcgaggagggcctttaggatttgtggtgaggggcaccccagggtgggcagtacctcaggatgcattttcaacacagcctcacggtgcacagaaaccgaaaaccgcatgccgacaaacggctccctcggcaaacatttttatttccaattagcaaaagaaaaattgctaatttgctgcagttggaccaggctgacgtctcaatctgcggagtgtcagcgcagtgaaagaaaatgtttcacactgtgtcggcgagagcaagcagctctaaagagggtcagggcagcgggcccagaaaccagattgactggccacagcgctaaattactcacacaagacacacattgtctgccgtgccagctcccggaggacctgccttctcattctttccccttggagctggggcgggggaaggggtccagcgtgggaggagagcgcagggggctggcaggccctcggtagggcagtatcatctttgggaacagagagagtcagaagccgggttaataattacccaggtctgtctgcagtgttcgggaacaggacgataaaattctcccagatccccgccacagctctgcactcgggagattctgtgcagataatgtcccgcaggagtgagggctgaacatggcaggagcaagggctgaacatggcaggagcggccatctctctcgccctgcatttcaaggctctgtaaccgcccgcctgccctgcttcaccgacttcgggagaaacccccatacctcacgggcgctgtctccccacctctggcaagccggaggaggatatctcagcaaagccagctcccccacaggcatgaggtcccccggatccacggagctagcacaggccatggacccagaccggcggagtctccctggggagatggcgaggctgcggtgctggccacagatgtttggcgctgaggtaataatgagcctctcctgaaaaccattgaccacgtaacctcagacagtaaaagcccccgagtgggctctcagaggatctaaatgggtttgcctgcatctccagacatagccctcattttgaagagacattcattccgtgcccacacgcgccgggaggaatgcatcttgtcctcgccgtgcccacgccgtcactccgtctgcggcaccttcctccacacatctctgtggccccacagcacgcccagcctcccagccgatgcacacaaaacctgtccccaacaccgtggggccacgtcacaggcatcatagcagccggccagggcagccccaggacctgtggtctgtcctggctcagactcacgcccagggccaatccaggagctacctgcagccctccccgcgtctgccaccttccacagctctgtgggcctgggacctggtcacgcaggaccagcacaggttggggcaacattgggtcggcagggctgagaaagccaagacctgcttgcaggtgcaggggccacaggagcagccggcccacctggcctcgagtcttgccgtacccccaggctgctgtggttctccttggcctgaaatgcaacggaaggctgactttggggatggtctagaggggccctttcttgaaaggacaccatttggtctctctccccattctctggcagttcctgggtgtcactgggagaagctccctggatgacaggtgtgcaggggcctggcaaacaggaacccaaacagggaggcagcccagggtgcagggctcgtgcatctgctcgcctcctccaagggtgctgctacagtctgcatggggaagctcctcgccttggtctctttgagataagctgcccagggaggaaagggccaacctagcccagccttgggagaaagtgcaccacagtggcagagccagcctcttccagccctttgacacatggtgatttcagaatccatcccatcaggccacttgatgctcagactcaagagagggagaccctgtctgggagcaggagtcatgtttacaacccagggtggtcagtgaggtggagaggggggacgggttgccagtggctgggccttggaatttcagctggccatgccgacactggcttagggccttgggacgtgtgcaacctcaccgtgtgcaactcagcctcagcattcggtctctggcaaagatgggcagtgccccacagcctctgcctcactccgctcttcagggaaacagtctctagactaagagagcagaagactggactctgggcctcccggttccagcgctcagttgcctgctgtgtggccttaaagtcatgagcctctctgagcctccggttcagcgtaacagagacaatcaaaccggatcatgtacgtgggacttttttccagaagatgcaaaagctgcttggatttgctgtgtttgcacaaatgacaggcgcttgcagctggcctcactggggagactctttgtccggcctgcaccgactctctaagcactgcatgttctttagtcaaaataaagcattgctggtcgggccagcagtcacagagaagtctggcttccaatgaacgtcatgcactgcgcttgcttggagagcagaggcaggggcagcctcttgcatttcccccttctcccctcaatgcctgcccggccctgaaatgtccaccctgggcatgtgggacacacatggatgcccccatgtacacgcatgcacacacatacacatgcacagacgcacatgtgtgcaaacagtgacatgcatgcgtgtctaggcacatgtacacacaaacacaggtcgtgcatgcaaaacacatgtgcacacagatgtccacacacatatacaatttcctcatggagaattcactcccatcctgaggcccagaaccttggagccatcctcagagtttgctgggtatggagaaatctgtgcaggaaaagccacaaatttagatggggatacagtaaacttcatgaagtagtctcgcgtcttatctgctccctagaccctggagggcgtccactgctccccagcagaggtctgcaggccccgtgctggcaggaagtgaggtgagggaggcccaaggggaaggaggggctgttgcaggtgcgtttgcagggccagcctccgccacaggtgccgtgaccttgagctcaggtcccaccccctgacaaagcaaataaccagccagagggctgcccacgtgggttccctcccacccacccagcccagcctcccccagtgaggagctggtgacgacagatgtaattcccctgggagggagcggtgccccagctgctggccctgagatgtattttccagcgttctgagctggaagaacaagctgaggctccagcaggcctgggtgctgggacttcctcttttttgctgaggaaggtctctctccctccctccgccatgaggagtgggggctcgcagcctgttgccaactaccccgcctttcttccctccaggaagcctctccttcggcctgtggtcggcttcaggaggtggaacctgcggggcccctgccaaccaatggtgctggtgctgggtgtgtttcatggccctgcccagcaggcctcatgcaccagctaccatgcaggggagggcctgctccccatcccagggcacttaggcccagcccacaccccaacgtgagactctggggcggactgggcatgggtgctctgcagggcccctgactgtctccagcgtgcagtggggcgaggaccagcatccccattcccagcactgcagtggatgcaggcttggttctggatctttccccacatccatctgtgattcctgggcttgtggtttccaaagctgaagcctgatgtgagggcactttgcatccaaaggggcctggagaaagtgtgcagtttgccctcaaggccggggtggagtttggtgggtgggttggggagcaagaccaggttgaggggcatttggatcggtcaagacatccccagctccagagactcccagacatgagcgtgcgtggggtagcatctgcagatggaagctcctgttcatagaggtatccttggagcagccaaggtggccctgcctccgccgtggccaaaatcaaggctttttttttttttttttttttttttgagacagagtcttgctctgttgccaggctggagtgcagtggtgcgatcttggctcactgcaacctccgaaaatcaaggcttctttctggagtctgggaattagcaaatgaacacaccctgggccagttttaactagggcgcggctcatcgcagtgttgattacggagttgctatcgattttcgtggggagcaaacgtttctggagtttacgatgcctgttatcgtttggctgctagaagcgctgctgatgagccgaagttcatcttttgtctggaatgttcctgggctcaggcatcttccccagctcaggagtgtcacgcctcacacaggtgctgaccccacgctcacccccggcatgcaggcatttttctcttaatcgtggcaagagggagaaagactggccatccaagtacgtgatggtgaatctagaataacattgcttggattttctttttcttgagctcaaactaaactcatccaaagcctgctttacctctcagggctgcaggggaatgcaccatcaatttgagtgttgggtctgcatactcatgtcagccctaggaactaacttctcagtcaatcacagaccaggtgcaagaggtcacgcgataccagggctggggatcagcccccggaatggagggggtcggcggaacaggcagcgagaaccgggaataaccagagtgggaccagcacaggggtgcagcctcctgtctcatcacccaccttgtccactgcctttttcaactttaaacaccgtgagcagatgaacgaggaagacagttttccaaccccatctgaggcgtctcctccttttacaaatattaagataaacgggtatcacttttggaaattttatatataataggaaatctatggcaccgatcagggatttctcttccagggaagctattgtgtcaggtaaagaggcggccatacatcagccggctctgcccctcaaatagataatcaatttccctgaaagcatcaataaccagagtggacatttattgccccgtggatggtttatctttggggctggggacagcagggccgtgatgaataccaaatctgccagggaacacaattaaatgctgcgaagataaaggattttatatcgtgcacaaaaaagcaatcaaattcataattgaactccattgcatgaaaccagccagagataaatatcacacccaaaagtgtataacctgggtgccgtgttatgggtcaggcgacagtgttgccaatacccagtagtgtctccctctggaggccccggtgcgcccctctcgctggggtaccagcttccaattgccactctctctccctctccccttccgcatgtgcccagggccactctctctccctctccccttctgcacgcacccacagccactctctctccctctccccttccacacgcgctcggggcttcggccagtgctttttctttttctttccttagagaagagaaaacgtgctccggtctgacttgtcttaaacctgcagaactgtgttcccctctggccacctgcattaggcggccccaagggggatgatgaggtggaggaatgagggccacagcctggataaaagatactgtgggctccacaggatgacagggggaacccctactgtgaagccaggcgggaggatgcctactgtggtgccaccctggttccgaggagaccctgagctgctccaggcaagagctctgggaaggactatgcaatctcgtctctgcggacttgtgtctccagagaaattgctccttcctgttggacgcagcatctcagggactctggcggggccacaggggcagatacggtgcttgggtcagagacaaagagcaagaaaaggccaagggcatcaccttcccatttgttgcgttcctcctgaggtgggggcgaggagcgccttcattacggttcaggtctgcttggacttcatgaacttgattttcaaaagaaccttgaaaatgttagagtttaaggtcatatatgcttggcaaaatatggcttttagcttggaaggaaaaaaaaaggcatagagggcattttggacacaaaatagctctttaaaacagcattttgatgagttaagtataaataaatcagaaacacacggatctcatttcctttaaaatacccgcgggctcaaacactagcgggaaaagtgcctggcaaacggcggtttgggattttgacaaacccaaatattttgaagaggtttctgaaatgtttgcacccaggtctcctctctgccctacctttagtgcgtgcctgtgtgcgctggtccccgtcggcctctgaagggcaggtccagccagcacggcgcgtggacaccactctctgtgtcctgggtgcaggctttccacagcctgacctgatgatgtgcagcttgcctgtgtgtgtgtgtgtgtgtgtgtgtgtgtgtgtgtgtgtgtgtgcgcgcgcgcagaaggaaggaaacgcaaggaagatcagttaagggatgaggctttgggtcttcaagaattctaacttattttggcgtggaatggggaaaaaaaaacacatgagaatcctacttgaaggagttgaaataaggctctaaaaccggcactggaatgaagtcagcagtgtctgctcccagcccaaacatctgggctccaagtgggcaatcggccccacctccagaagtgtcggatcacaggacacagctcctggggacggagccgccggggcagccagatgtgtgggcaccgcacaggcaaagccggtggcatgctccaatgcaaggccatcttctttacctctgcaggaacaaatcggatcaggtgaggctgattctcctgcatccgtgcctcagcccttagtggtcccagatcattgtggtggccacttttaggacagggccagagccttggcctcgacctcgcccagcaggcaggcagccctcccaggacccttgggtgaaactccagcttcctcctccaggtagctcaggtgccagcaggtaaggctgggagcagctatccctgaagccaacccacttccttcctgttcagagctaagagctgccaagaagcacggggtggctgctcagattcatgaggtctgctctgcacttttacaacctaataaaatttgggggcatctgagaggaacaccgaggggcacacggggacgttgacatgttgtggtggggtcattcagacaggacctgagtgccgctcttcatttggtcctgaattcgggtgtgcggtgaggctgcgcctggcaccccggatccctccacggcttcccccttatctagagcatctggccccatcttggccgtctctgctcgctcagagacataaacagaaatgccgtttggcaaaggcggccctaaaacatctttccctgaaatgttccttttggcgtctgattaggaaaaaaaaccttgcaattaatactcttgagttggattgtgagattttctgcagaattaggcttggagcatttaacaacaaggttccttattgcccagcctctaaatttataataaaaataaatgtttccccttcctgacgttgaaggccatgccaactgcagagaggggcctggatgcaagaggaagcaattggattcacttaaatgccgcagacataaacccctgcacgccttcgcaggactgggtccccgcacggggaccccagggaatgagaacggtgtcggctaatctccgagcacttctcctaattgtacagtgctccgcgctaatcaacatccaatgcccgttctctttaagaccaagacagaacaaagcctcaaattactaattacacaaatacagtgtcttttgctaattggattggttaatgttagttaataaagcactttaaggataggcaatgtggtatgaaagaggcaattcatacgtttaataataggctaataactgtcagcaatgaataatcagccgttgtcacgtgcaacgaacatccacgctctttccagctcttcgggcgtctgttacaaattaatgcctttgcaggagccagcctgtgctccaagcccctcatccccgggctgctggagctccgaccttgccttctcgcccggcgaggacctgcagctcacacaccgcagccccggtggccgtttggggagtttatcctctgaagaaaaatgaagccctgttatttctattatttatgaaagagcctttggccaagcgattagggacaggaaccagagtcctgcatccttgtcccgaggccacaggctttgctgttttactcagtgaccccgggcaagctccttgacccccacgggcctccgtcaactcagctggaaaattgggtaaaaagattgcggtgtctctcaggcatggagctgcagactggaggtgcgtaaggccggcgggaccgtgacagtccagcgtggggccgcagctgcggcggggctctgccgtgcactctagcagccagtgccaaaagggaatcaggacccgtgggccccaaatcagcccccaggacctgagatgtagggcccggctccgggacctggtttggtaaaatgcaaagacccaagtccacagctggctgcccaggctgcccgtctccgccagccctaaccctttagctcctcttcaaatatcagaagaaagaggtggctgtgaagagcttcttgcagggggtggccgggtctcctgagcaggacctgttcctgggcaagagctcctgtggggacaggtgctgggcagccaggggctttagagccggcgttctctctttttccatcacgacaagtgccaacaccactatgacctacacccgagtgggtcgagtttgctcttcctccaagtctctgtttcgagccgtgggctcttcgcagtatcccaggcttcacagtcacatccaagtaaatgttgttccgctccgggaaagcgagatctttaagacaaaacagaagcgccagtggcgaggctgtccctgccagttggcagcactgattgagtgtgcgggggtcctccctcttctgaagagagtccccggagggatgtgtccagtgtgtgtccttcccgggactgaagcctggaaaagcacaaagcattttccagaaaagagaagcaaaccgaggatgggatgcacttgcgttcactcgcgataaacgagacgccttgaaagtggaacaggatcccaccgttttctgcctgaacgtgcacaggtgaatctgcacaccccaggcagccccacccccagaaaattctgtttgttaagtacaggaatgtaccagaattaattacttgaggctacacaaagctaacagaaatggaggtcaagagaaagcagtttttgtgcgcctctcagagtaacgctgttggtctcctgcggcccaaagggagctctgggccagccccagggaggaagtcctgtgccaggctcagaggagtccaagatgggcataaagttgaatgagggctgtatagtctccctgccctctccccactgcctcgacaacgttgcagctgccccagctgtggaacgcagggcttcggcctgtacatatcatccctcatgagctgggggctcctcgccatggcccatccctccagaaccagtaccacctagttctgcaggtgagaccctctgtcatccctctgcccgtccacctgcactgtccacccagcttcccaggcctcctgccatggggtctcctttctctccctccatctctctctctctgaacgggacgcgctgagccatcaccgccacgggcagtgctttcccacaggcttgcctggttcacagccggcaacctcacccctcttttcagtccttgggaagagcaaataaatcacactgcagaacagctctcccagccctaagaataaagtttaagtaactgtgtctgagactatttctgtagctcttcaagatgagccttcctgggtgaatgccttcgcaggcgggaaggtgcccgtttctaaagccacttgggcagagcacctccccagggcaccgtgaacacaaccctcctgcatccatggagcaagcagccagggaggagcccagggtcatggcgagaggaaggcgcctcttccgctactgactggtggatattcccccagggccatcgttacccacacacgggctgggtggacaggtgtccctgggagcactgttcacccacagtccagcacagaagcagtcagggaggactgtgagatcgggcaagaggtgcccacacctgcaggtgccccgggggcccctccccggcctcccctaggtggcctgggaagcacattcacccccatgcccctgtctttctcctgcactaaaggacatttttctcagtccatcctgcagacagatggtgaccttgtcatgtttgttgacagccacacggcatagctgagaatcaaagcgccacctcccatcttccctgtcagggcctccaagccacaggatgtacattccaagcctcacaggcaggatggcagaatcggatcggatcccagtcccacccagccacttgcagcccatgagcctggtcactgaacctgctgtccgtgctgacctcctgcagctggagacaaaccagggaaaccttaagggtctctttcttcttatcttagggctaaaaaaaagaagggaggcgagcaggtgtgtctgtttttctgaggctcatggacagcaggcaggagcagcccccagaggagcccctggcccaggctccattctcagacacgggcgggagggagagtggtttgctctcttccttagagcagggtctctgcccttgtttcagtgacttgttagaaagcaaggaaagatggtgcaaaataaagctgcagctccgtgcaggtgtcgggaccaaaagcagctgccctggcgcccgcgtttagtttgcatgaacactctgtgcacttcggatgcatggctgtggcccaaggaggaacgcgcatccccctgcagctctctgggatccctggacccctacagggtcactgtgagatgaaatcactagaggatgctttcgggcacccagtgtgctgtctagccgagggcctcaagagagacagactggcctccactggcaactgctgctccatccctgacctgcccgacggctctccacaaggccaggcaagggtgccaactagatggccgttctagattcctggatgttgctaggtctcacggaggcctttctgcactaggactccactcccagcctcctgggacgagtccttggggtagcaatggagtgagactccacagtcatccagacaagaagctcagttagcgccggactcacggccaccagacctgccccagagaagagacccttccccatcccagaggaggttgaatatccagggaagttgtgtggatggaaattgacattctgagggtttggggatctcccttgtggcaagttcgtgtgcttctccttgttggaaaacaaacaggaggaaaataagaaaaatataaatgaacagccgtttcagactgcttcccatctcacaccacctttccccgtgggaggctccagctgagaaggcagctccgacgcggccccggttggggtgaggcaggacagctgtccccaggattgggtgttcccagcagccctgcctgcctgtctcgctggctgtgtggtgcctgcgcaccttccttccccacacctgcccggtgcgaccgcactgcagcctcgggcaccatgaggcattcgaagtgacaaccttatggtatttcctctgcttggggttttgccttggccgtttggtgttgggagcaggtgtgagcaaagggagcagggacagatgagccacctctgctcgtggaagcctcccattcctggagagaggctggggaaggctcgtccccgcctctctgctggcagctggactggctacccaaggacatgagtgccctcttatctccgtcctccttggagccgtggtgtctctgccgtgggccggggtcaatgtgcctccaatgtaaaagtccagatcatgtataatttaggctttctgtgtcctgtgtgacctccgtcccatacacgtttttgtttatttttacaacccttcatacacgtaaaagccgcccatcctgccatcacccttactaggttaatcgccacaagaggcttttggtccgcaagtcatggcagtcttgaaaacgggtggttacgtcttgagcgccatcacgatttgtgtgcacatgccgaaaataggtgagtgatgggccaggcagcgttgctgtttgcatcttccccgtcgtcatggacagcggtcaaggccgtctccccttctccgtcgtcagggacagcggtcaaggccgtccccctggggcatctgcctcccgcttcacagatgagggcgtcgaggctgctcagcccaggggatgcgggggtcgagaggtgtttctgggactcacaatgggaagcgctggcttggggcccaggattatttgcctggtttctgccgtccttcccagctctgtgaaaggcaccagaaggaaggaaggtcggaggaacattccgtgttggtcagggagcccctgaaggcatcctccagggcaggtggccttggccgtacgtctgcccacatctcagcaaggctgggcagtccctggacttggtatggcctggaaatgcagacgtgggaccccgggaggttacttggaaatcacgggcagagcgggcagcctttcacctgccaggccttcctggttcagcttctccactaactccgccccaagagagtaaagctggaccctggggggtcccggctgcagccacagttgcatggacgttgcaagactccagaggtggccagtttttcccagcagatcagcccggaattcctcgctgcagctgttcctgtcactgggtcccattaggaaagcatgcagtcttgtttggtgacgctctgcctcccgctgccttcacgcacggtggtctcgagttcgcaggcagctgcgaccgacacccaggagctcgggcctctgtgtgttgtccctgcaacagattggaaacattccttatgtgagagaaagcaaagctcttcatctccctctcccttcccgccgatccatctccctcacttctccaaatggaaccagttcaagggaggccaaataagcgaatggctcggataatgccgggtggagctgcacggcctgagtttgaatcccagctctgccatttgctggccctgtgacattggacgacttaacctaacctctctgagcctcagcattctcaggtgtaaatggggattattgtaggattatttcaagcattaaataggatgatgcagtgacacctttggcagagctagcatattagctgttattattatcattgttattttatttcaatcaggaataaaatacaacgggaaacaattgtacttctggcctccttggcttgcaagtttgcggaactcagaaatgcgagtccacaaatgcttgcttcgtgagtaagtgggatgcatgacaagcgaggatgagagaaagactgaatttgatcagggaagggccaaggggggtagtgacactggcagctgcttctgcttcctccatccccagaaaggtgctgcctgccatttttaagggaattaaaattccatattctgctcggatatggatccactttcggatcttgaaaggtttcccaaacctcagtgagtggtgtcgtagccagagaagagcccaactttggggaggtcagattctcccacccagtcctgggtcttggggctttcaaacgcacatgtgacccaggcgctgttaccaggagatctacgacccttcttattcacttatgattattaagaattaccttaataaacgagggatcaatcagcagagtcaggtggaagtgcattcatatgattctgtcaatttccaggtcatttctataactaaaaagggttgagataaaagataaatgtttgtatagaaccgatcattgatcctgtgatttattttccccgtggaaagcgaagctccctggggagatgctggtgcagagcccaccgggctgccctggaggagtgccagtgagggagcctccagcagctgccccctgcccagggtgggggtggccggtggccgcgcggtgcctagcacctcctgtgtcgtcggtgtggaggagggaccgtcagcattttcagaagcagggtggaaaatggccagcagtggacctgggagggcacatctttcagatgtgagtcgggacagccactttggggtttgcaatggcagagtttggtgttggtttaagtgattgggggaaggcacagcgcacccgccggagctggggtcccctcctgccgctgccactcacagtgagcggaatctgtcctggggcgcaaagggctcaggctgagcatggaacatcccctgctcacagacactggcctttggaagatggaaaaccattccgccagcatccttctccctgcccctgtgagtgcggccagcctggcctggtcctctctgcccagcaggcctgcagtagcctccttcagcagcctccctgttgcctacataactttactaacacaggagagccgacgttagattgtcccatcacaaaataaactaatgatgaatgaagagggcagggcaagcttttggaggtgatggatgggtttatggtgtggatcgtggcgatggtttcttggtgcattcttgcgtctccaggctcataaagttgtctacattaaataccaacagctttttatatgccaatcataccgcaatgaagtgttggggtttttttaaaaaaaaaaaaaggtggggggaaattctatgaactctgggagactgttgagatggcctcttgcgggtgggagtggctgctggaggatgggcacagggcccactgctccccttccatttgtcttggctgagcctggagccctcggctccttgacgctcccaccaggctggatgtgactttcggggtttgcgattgggtcggtcccggtgtcctgggagtgtgttcagggcttgggctcttggaacccgggcatgggactgtcgtgttgatttcgtcttcagggttcatccctgactcatccccctgttctgggggccttcctctgcggtagctttgatgcttcctctccagtatggtcaccaacagaggggcttcccgagacaggggctttcagagctcaaatccagacagtcctggccacaggttggtcctcttgtccccggggccctgacacggagcctgcacaaaggagctgtccccgccccagcagctcaggtccatcctcaactccccaggctgccccggccaggccacttccaggccaagcagccgcaagacaggcgggagccggaccctgtgcctcgaggcccaggtatctgatttctagccgcctgcccgagacgcctggtccagcaagaggccctgagcctgtcagggtggccagggcagcttccctaagccccatagtcagagagccaccccgagcacagggcccccgcaggctggatggccgggccccaccgtgactgtgccagtccccaccctccacccacaggccagggcctggttcccaggggcctggcccaggtgaacatgaccatgtagcagctcggtaaattctacaaggagagctcccattttccactcactgactcatgatttattattcggtaaatgccacgtggggtctcccttgtgttcctgctcggaggggccgtgatggtgcctgacacccacctttggcctaaaggggcgtctaatccaggagggaggacgggcctgcctgtaataactgggcagctctgaagtgaggctggccatccttttccaggctgcagggctctgatgaaagttggtggagaaataaagtgtgagtgggttgggtcaaggtcacctgccgtccacttagaaccatcagcttcaacaccaccttcccagcacagaagctgcagagtgcagagggtgtccctgggatcggctccactggcgtcccagccagagccccctaccgagccctgcctgcaggtcctggggccctgcgaggccgcccagccgctccaggccttggctctttcatcttctagaacccaggccctcggaagctctgagaccagctccaggaacaaacagcctcgcagaactttctcctcatttccagggcgtgcgtgtccagttcctgagctggctacgggaggctcttggactggccgctgcttccctttctcgtgctggaagtgatggctcttcatgagccattgatcgcgagggccacatgtcacctgcttttatgatttacattcccttcccctggggacatcaatcttccggaagcagaaggaggaaggtgtccacagagggccagaagcaatgctggacacccctgtgctcggggacaggggcctgcagagatccttcccgctcgccccgctgcctggcagagaaagggctctggagcctgcgccccaggggctgatagcctcctgccagtccccacaccaggtcacccccacccgctctcaccttgctccatcagcaggggctcccaggtggagcccaggaacaacaggccttccccagctccgcctgacatgggggaaagagcgcccgtgagtccaggacggcgggggcggggtgtggggggtccctgccatgtagaccccggaagcctgccctgctccagggaatctcaggctgggtcagatctcccccaggcccctcatttggaaagggctgtcctgcctgtgtggggcggagctctgagatctggagcagcccatcgagcatggcgggggagtgggggttgtgtggtggaggagctgcgtctttggcttggtggagaattcaaagctgtggctggaatggcccaagcattctggaagtttgggaaggtctgaacgtggtaacctgcactctctcctctctggaaagggatagcatggcgggggcagtatccagagagcaggcatccctgcaggcgccaccctccccagacaactgcagccccagggcaggtggtcagttatagccctgcccccaactctaccttgtgccccgaggtgctagaggcagagggcagagcaaggtcacagccagggcaggccagggggaccccacagtgcctccttgtctcccacagcccctggggctgggaaggaggcttggagaggcctggcggggggtggcttcccaggccaggagcagttggagagagagacaggacccccaccctagggcttccagcagcctcgtcctctgagaggctcctgtgacttccaggtcaaggaccacaaatatgctaatggcctgggggggcgcttgtctgaccaccgcattggcaatgaggtgggcagaggaaagtgagtcctcacagggctgcttgcaggctggaagggagtggggcctcctgggtacttcaccagcaagctgggcgtggccatgggccccacgccggtgggtgcctgggtgacccgggctgggggccagggctggtctacacctgtgtatcttcaggcttccctgggaaaaggggctgcccagccctgccctcggtgtgcaccacctactcagggtccactcaccttgatcttggcagggcccatgtgaatccagggtgagcccgggttagcactcccctgctgtcaaattcgggaggctactttacctctctgagccccttcctcttctgcacagagcaggaagccatagccttgctcgtgggtgtgttctggggtttacatgcattattgggggccaagtacccagtgcggagcccggcctgcctggcccttggccctccacctcaccatggaggcctcttgtcctgggcagcctccttctctgtgtgaggagagctagacaggtcctagcaaagggaggaagctggggggcacaggccggatggagcccactgcggggccccacacttgggtcagcaggaaagacccccacatgctcctccgagcagacatgaggagggagaccccttgggggcccgtgcacacaggaagccacccttcctgcaaactgtccctcctccacaccccatgcccccatcgtctgtttcttgcctccatccgagagcccctgcctgagtgaaatccctcagcctggtcctcaaagggccatggcagagctccccccaggcttcccaaccccagggctcctccgtctctggggtgctcatttgccccctgctaacacctttgtgcatatgctgcctcactcccagccccatcacctcctgggctccccacccccacttcgggaccccacccccaagaggacctcagctcccagacttggagatctttcctcttcctcgtgttgatgttgctgtggaaggcagggtgggtcctacccattgtgtctgccccagagtagtgaattctggactaaatactgtttccgtattttttaaatgtctccaaggcactctccgtggggcagtgtagaccaaaggtgctcaataccacttatgaaatgaggacatgaaggggtgtggagcctgctcccgggggccagggagaggaagagcagtgcccattcaatcatctcacaggaagggagatgcgcgcggggccagcctcgcccgggcggtgtgtccaggccaaggggcagcactcacaggcggggctgccagcgaacagagtgttcttggaacatcagaaagagaagcaggccatgcccagattttgggtcttcaaggccttgctggctgggcggggcagggccaggcggtggcagccctgcaggtcgagagaaaatcactgggcgtgcactgaagtctgctggctctagcagactgcttgtggccggagcaaagcacaaggccccatctcaccaggtcagcggagatgctgcctgcctggagctcgggtcccatggggttgggggcgaagatgctgcatcccagtgctgttccctgctcggggccctggaagcagagcggcctggcttctctcattggccaaagagggtttggaaggtagggcttaggggccattccctcctgtcgcacagccctgcggggttctcatgcggaaccccaggccaacccctgatgacagggcccaacgcgggaggcttgggaaggcctttggtggtgggggcaggggatgcggagggcaggagtgagggaggtggtggctgggagtgtaaacagcggcgtagagacctctgtgcatttcaggacgggctctccagagcccagggtccttttctgtgccgtacttgactgtgtaaatatttttcttaggagtaaagagagagcctccattcattggatggatctcacttgaaggaactgagaagtaactgtttaggcataaaagctaaaagcagtgtccaaggagctttaaaaaaaatcatttctgtagctcaaacacggccaagctgatttttttaatgcaaaaaataaataaatattatcctactcccggttgagagcgcaagggtttgtgtcaacaccagtgcagtctttgctctgcgagccagaggcggggcggccggcgactaaccgcctttcacggttcttgcgggagctgccaacgggaagccgcccagctttgctggagcccacacggccggagggagcttggccgtggagagagtcctggccggggttcaggtgcaagtcccgggtggaagggcctggcgtgtgtcttcttcctgccgaggcatccacccggaggcctctgtcctgccggagcacactcctggagtcaggaggcccagactcgagtgcgggcgctgccctgagcagctcctcgacatctgcccggtcacctcaactctgcagcccctgtttcccgtctacacagcaggggcgttgctggttcctgcttcccacatgtggttgtgaggaggaggtccgcgtctgcggtgcctgggacaggccccccacatgtggcagggccccaaaaaatgacccgctgctgttatgactggcttcaccattgccatcaccttgatgcaacatttacaccagggaaattggcagcacccacggcttccatttggaaaagaaaattaagaatgagatttgttctttaaaaactccatcttctcagaaagggaggatgtgtgggtggccgtggacattcctctccgagagtgagatgaccctgagatgtggaggctcagtgtggcctggtcatcagcttccagccctgccaggggcactgtttagttgggtgtaaaaccctgctgaacatgtaggccgcatggaagctgaagctgctgaccaccaagacctttgctcagactgtgtccagcagaaccctgagcccctcgaccccacagtctcccagcagtgagcagagtgaggcttggagcctggatgggatgtggaggttgtagacagctccatcagccttgccatttgtatgcccctgggtgccctgcatagacaaccctgaccccccgactccacccataggggcttcttcaaggagaagaggccttggaatcagcttttagcaggttctagactcagacccacatctttgggtccaacgaagctacttcagaaatgggcaagaaagaaaagtaggttagaaccagccacagtggctcacgcctgtcatcctagcactttgggaggccaaggcaggagaattgcttgagcccaggagttagaaatcagcctgaacaacatagtgagaccctgtctctacaaaaaatacaaaaaattagccagacatggtggagcatgcctctaatcctagctatttgggaggcagaggtgggaggatcacctgagcccaggaggtcgaggttgcagtgagctgatagagccactgcactctagcctggaggctgggggtgggcggggagagagagagagaagaaaagtaaagaagaaagaaagaaagaaaagaaaagagagagaggaaggaaagatggagagagagagaagaggagaggagaagaggagaggagaggagaagaggagaggagaggagaggagaggagaggagaggagaggagaggagaggaggagaagagaagagaagaaagaaaagaaagaaaagttagagccgagctgggcatgatggctcacatctataatcacagaactttgggaggattgctggagtccaggagtcccagcctgggcaacatagtgagaccccatctctacaaaaaataaaacaaattagccgggatggtggtgtgcttgttgtcccagctactcaggaggctgagttgagaggatcgcttgagctcaggaggctgaggctgcagtgagccatgattgcaccactgcactccagcctgggtgagacaacctgtttcaaaaaaaaaaaaaaaacagaaaaagaagaagaagaaagaaaagagaagtaggttagagagagaaggtttgctctcaatgccaagagcaaggggtgggtaaagcggagtgttggggtccctcatgggcctcagcctcctccgcaccgggctccgtccacctcccgctggtatggaagcagctccgtggccggggctcactctgggtttcctccttagttaggttctcagatactttaataacagataattttgacgggagagaaaccttctgggatccatttgtggcaccaaacagcaagctgagcccccctggggcggcgccagaactccagagccctaagcgcctctgcgtacgtggcctctttgctgactttttggagaacagagggtatttattttaagagtcaaaaaagaggttctgaccaaccccacttagctaaatcctggcgctgggacccgtgagagcagctaaacgccagaggtcagacctcgctttttttggctaaaacgcttaatcaaacacacctaatacttctgccggggtgcggggaggttgagagcgcggcggccgctgccagcaatcgaggagccagcggcgcgtgtgctgagggcccagctagcaaaataaagagggttttcagcggagcggcggctcaggcgaggctgggggagccggggagcgcgtcccgccatttttccagccgaggtcagcagcgggtgaaggggcggagtccgtggtgttcccaactgcccaggcgggcggtgagatggggcaggcggttccgcaacgcggctcaggccccagcgccctgcctgcaggaggccgcttctttctctgttgccatcgggcgccggtttcctcttccggggatgcagggcagctgggggggctctgcctctgtgcggctcttccgtggttccacgctgggctccggggtgaccacagtcctcagcagcccacaccctcagcccgaagggggcccaggccccgtgcccagaggatccagagagacagccgggagcccagcagctgtggcagctgcccccaccaccaccccggggctggccaggtcccacctcctgacgccacacggtatgactgggccctcctggtcagtgcgtcgcatgtaacgccttcaactattggggccggtgttggagcatccgtctctgcgtccccacctgatgacaagctccggggagcaggagtgctggccaagcccacgcacggaccaagcccacgtcagactccgccagaaaggcaagaagggcctccgcatggcgtgacggatgggtttatgggggcattccatcccacccggacgctcggagggcagggagacaggaagatcaggcgaccaaaagtgcaagtgaaaatgcagctggccacagcaggaacggtgggcgcccagcagagagcagcgtggacagagggagggcggcccccacctgagaggctatgcatctgaggccacagcaggcccagggtggcatcggtgggtggctggagggctgtcacgctagccccctccgaatgtgaggttgtggtgttaacgggggctcctgggctgaccctgcctgggagtgatcgtgggggtgtcacctgcattgggaatggcttgaatgggccgtggcatgcactttcccactgggaacaggagggagcctcccggaaaatgcccagaggccaccaaatgctcccaggccagcgccaggcccctgtgggctctgggtgggtacgtgggtttgtgagcaggtactggcaggacagggcggggagggcagggccctctcgctggtggtgtctgcacaggtgcctgtgactccgccgcaaatgccagagagatacaaacagcatctcactcctcgacgtgcctcacgaagcaggcaggactggggaggccctggttctggtttcagcccagcctttaactggcaacaagatccacagtttctctgcccggggcggctcactacggcgggatctgtccttctactctcgagagctccagcaccaccactgggacggggcatccctttcaccagacctgggatggccaaacggtcctccagcatccagagtgaggagagattccacctgagcagctcctcgagctctgcctccagcacgcctcggccccgcaggcaggtcacaccctactaaggctttctcctcttccaaacgcagcccatctaggtgcctgaatctagcagccatcactgccattcacattagcgcagggtgacccggaaggcgatggggctgggccccactgtgactgggaacgccagctcgtcaattgcaccttggtaggcacgctgtgctgctgtgctccgtccttaggatttgtaaagccatcatgtaatattaaggggaggggaaagaaaatctttggcttgagcatcattttctcgttttatttttcaagtatcagtttcaatcttggtttctattcttatggaaacaacgttgcggtttccgtatactcgaccgtgcatggccactttgggtccagaagggaaaaatccaatttctagagctcatttgtcagtttgcttagcacagacagcactctgggatgggtcactgagacgccgccactctggagtgcagcctggtggcttttaagaggagacacccggcgaaatgctctccagagccaaagaacgttccggctggagcgacctgggaggaagaacgagccgactgctggcccactccagcctccctgtctcggcctctgtccacacgtgggtgagggggtgggagctcctgtgtggcccacagcccgctgctgggggtcctcagtggccaccccgggcacctgcatggcactaggcacagcggcttttctgccttagctccatttcctttgagaagtttcctccaaaagccatgggggacatccccctcccagggatctggatgggagtgaagagccagttaaaacactcccacctctgatttgccaaaaaaaaaaagaggaagcagagaaatggcatgagctccctctccctccagcacccaccaagccacccttccgcagggcgttggccgacctctgcccctgcctctggccgcccgccgctgtctcctgggaccgctgggcagagtccagctccccccgacctctgcctcctgagctggactgtaagcccccggagggcagggactgcacctcgctgtctctcacctgtccaggaccaggcacaacctaggccaagttacgtctaaatacacgtggtgtgattcgccggcggaacttggaggaaacacaaatagagtctgttcaccatccagggtgtccatgcgctcctcccagatggttctcataaataatatgaatggctcaccttgagacgccttgacctgggtccccacccaaccactaaagggccagagtgagctacacagtgtgtctccatccctggagtgcagtgtttccagggaggtgaagtccctggggggcgcttggagtcctcggtgactgggggagcctctgctggaagaagggatacctgtgatcaatggaacccttcatttcctgctgtggagaagccactgggtcccaccctgtgacttttggggacagtggttctgcccccaccatttagaacccagtgtagcttgagaatgttttatcagaaactaacaacccctctcaaaattgttttgcagcaaatactgacggacgtggaagtgtcgccccaggaaggctgcatcacaaaggtaggagagctcgccctgcgccgtctcagctccccagcgtcctcggagctcctggcggggcgaccgccatcccagctgtccctgagctaacaagcgtgtagtcggaatgttgctggcaggccccgagcaatgtgttatctgtggactgacgtgtgcacaggacggtggctttgctgtcattaggagggatggggaggtgggggtcatgtcgccgtagggtcacaggtacagggccatccgccactctcctaactcccgagagtggaggagagccctgtacctgtgggaaagcttcaggccacgcagacaggaaaattaaataaacgcaggttgtgtttatttaactgtctttgctggatactctcatgaaaagaatatggggaagaattggctgcagattcaacaaagcctttgctgcactcgtagcttccaaagaagcatcgttttaaataagcaaaaccacgaggcgagagaaaaagggtccacgtggcattatccacggctttgctgactggtggtggataacggctggtggacaaacattaggtctaacagatccagagggagaaccatgtgcagagaaacacacaggccctggggaggcacacacatagtcacatgtgtgcctgggtgtgcacactgcagtccagacggccaggaggaggaatggcctggaaagcagctccgaaacctagaacctgttcagcagccagaactcctcttcgacgggatatgcattgcctgcacgcacacacagacgtccacagacacagcacgctcacacgtggtggctgatctcctattttttgggggggggtttctagtaaaattaaagtaacagtctctcgcttggcatctttgctttaaagcaagataaaatttagagagagtcacatttacacatccccacccagacagcatcgcagggggcggggtggggcggggtgcaccatgggggttgctggcacagaggagccagtgctgagtcagtgcctaccgagtgctgttacaattctgtcagaattacaactggattccgtgacgcagcatatgggcttgaggggtactggcagccttgtggttaggaagctgagctgagtgttcaagtcatcaatactccatttttcccccaaagtcaaaggaaagtgctgtgctagtcctgccaaactcccagtctctgagccgaggcatttgggcagagctgcctacgagggacaggggacccaccatctgggcagagctatccgcaaagcacagggggacctgacccttctctccaggttcaaccccagatacattgattttggagaaagcatggcaatggagacttttgctgggcccgcagtgacccgctgaagggcctccggaaactgggtgaactggttcccgtgtccctccccgtcgctggtgtggctgtgtctggcctcctggggtccttttgtccaaggacaaggtgtcggctctcagtccccgccgtccacaggatgcctgaggtcttcctgcacccacgtttgactggagcaaatggagcaaattccagggctggtcttttccactttccctctttctcctttcctgcctctttaaatgagttcacattttcttaaaggacatagaggagcaggaaacagttagcagcgctgctgtatttccgagaactgcagtattttcacttcccacaaaaagtgacctgcagttagtgcgaatccctcaagttctcgagggagcctgaaatcactgggttttccaccccgatgcgtccctggaccgtctgacattttcaagacgccctccttggctgcgcctctcctgaatgcctcatggaggtggcctggcaggaggttagaaggggatcagtttatgctgggaggggttgcttggtctaggaacaggggtcaagtcagaaggtcaaaaggtcaagtctagatttaaagggcccgggggaggcaagtgctggctgcttctgaaccagaacgaactaggacagaaggagggtgaagtgggcgccgccttctgtgcctctgggccacggtgggtttgcctttgtgtcttatatgtgtggccattaggtctcgctcagtgtggcccaaggtcattcttgagagcggctcccggggtgggcatgagatgctgtccagccaggggcctacttccaagtgcccagggcagcaggcatccctctgacgcaggcccttggaaagcaggttgagaaccttgggtcgggctgaggagtctcaggttccgccatcccacggaatcagagcagacccgatgcacgagaccccccacggcaccgccgcgactgcagggagctcagcgcagggtaccagagccagcatcgggggcgttggtgggcggtcctgtccaagcaggcctcctgaccccagcccagggctcctccctgccgctgccctgcaggcccagtccgaggggctgggggctgcctggaggaggcacccaagtcctcaggcacagctccaccagagggggaggctgccacacagcactgcctgggccatcaactcatagttttttcagcctccgcaataaacaccgtcagcgtctggaggattcgagtgtttgccaaggccatgctggtgggagaatcagatccctaaccccagggctcagactggacccgttcagttacatttctaggcactctcggggagccgggggggttggggctgagagactgagagacatgagctaaaattcaaaggcaaagtcttcagactcgggggccaggaagaccaggacagacagccctcgagtgggcgtcagtccagacggagaccccaccctgcaaacaaatgcgccacttagagctgttggtataggtgcgatgtgtggattgctgccgtaactgtgcgcaccgcggtgctgttttcaggatgaattcagtacagtccttccttataggatgagaactctggtttaggggttttgtagtttgggtcacccaaaggcacacttgggaacattaaaaacctcataggggaacatgacgggggtggctgtgtgacctgtgggtgggcaactcctgtgtctggcttcagttcatccacctctgggaggattacacttcctgttctttatctgcctcagtgaaatgtgacgaagttaattaattcaatcagcagcttggcatatgagctgcagaaaaggtggtattttgtgaggaagccacggttaggaattctaagtatcagagagtgaggtttctgaagaggctggatgcaggatgactctactcagaatttacaggcgagggcggccgggccgagggttgtatggaggcctgggattcgaactcaggactgtggcgcggggcctggctcctgtgggcgctacagaggtgcctcccgttagccccgcccccaccccaggagggcggagccaccgccaggcgcaggggacggtcctcctccgtccttcctgcgccccttcagcttcgccctggactcccgcgttccctctgtctcacaccctggtctctgcgccttcgttcactccgcagcccttgcgcccgcgcagcccagagctttggcgctggcccgcgctcgctctggtgcgctcgccctggtgccctatgcgtgccctcgccgtccctgcgcccgtcctggtgcgccctgggcgcgcgtcaccggcgcttcccaaaaagtcacattggctgtgggtcgggctgcgtcgcgcctttcctggccgcggtgcggggacctctgggaccgctccctccagcggactctctatttagtctctgtttacttagagggaaagcccgggggctcctggagagcaaacatctgcgggagataatctagcgagttgtccatccatcactccgggcgcgcagctccctggagagcccgccggagccggtaataaaaaggccgggcgaagaggctttggggacgaatcaagagccgtgttaagggctcgctgaaaatggatggaagacattattaaggctcaatggccatcttatcaaaatccaataggatagacatttggcaaaaggcttaaatttattctttgactttctggagggcttgaatttatccgttaacaagagtgtagtccacccgggagatgctatcagctgaaagaattttgattcaatctctggcgatatgaaaggggaaacatggcccggcagcctttccctttgtccactttatcgtgttttccttccccctcttgaaaaggaaggacgtgttaatacagaacgggaaaacacaaacaaaaggaagtgaccttttctcttatttttattttctcttcccctccgcttctctatccccctcctcccaaaaataaatacatcgtgaattcgcatgggagggctaggcctggggacctggaaaaaaaacccttcagaagcttcggaaaaaacgcatccaccccagccagcccctagggcgaggggcgggagtgcagaggcttagaggagggtcaaaaataaatcgagctaataaagtcattccgccggaagaggggccggtgatgggtccataaatctctcccggttattattattacgtacaaaatgctacaggtcataaaagtcgtctgatagcccagccttgcattgtccaaacagggtgattgattgataatgacgataatttgtgaaatgattatttggatgttagaaccatggcctgtcccactgggctgttctgtgggcgttttctatagcccggcccgggcaaaatgcctctggtaacgaggagtccagaggtttcctgggtccctcccgtggggactgggggctaatgaaggatggctgctgagcccaggaagttgggagcgagacagacaggcaactgctaagtgtcttttgtgcagcagttactggaggaggccacacaccctgaggtctaaacgcagctgggacctcgctgggactccaggcagtttgtgagcaggatataccgagttcctggccatgccaggcttttagcccagcacagcaccacgcagccggagactgctgttcggtgtccagtcctgtggctcactgtgttctgtttgtattgttttcctcctaaaggaggctggagggctggggaggaagggagtagggggcaggggtagggaggggaggggatgtggttggagagatggagggaccctcaaacacagagctgcagaaggaggcgctgctatgcatgcatcgggctcagctggtgggtatgggaactagaaggctctctgggatgtactggatctagaaggctttctgcggcctccctaagcttggttttgctgaggcctgtgccagcgaggtgagtgaggttcagaccgccttttcccgttcccttaccagccagccagcaacacagatcccgccggagtgccgtcactaaactgcagtttacctacccatgcactttattaccaaaaaagaaaaaaaaaaatacacaccaaaatccctaaccctaagaaccctgctatccaaattattaatttgcatgtgggatcagttatgtctttatgaaatccaagtgtgtttagctgccccggagacagccccgagttgattttgataatctcagcctgaatagacttgcttcgtcgcagtaagccgcggacaaaaggctggacagtggctgaaagccctttgacaacatgtctctctttccattgtcccagggttgctgataaaagaatcgggagtccattaattcagtgaatgaacatatagtaaagtcagtcccctcttgagaacaataatgttgaggtcagctacggttgccatggaaactaagtattcctaagaagtttgcatccttgattttgctgaatcaaaggctgcaggcagagaggtgtaaggcggcccaggcagcagaaagtcggaaagcaccgcccacaccatccccttcccaaggcagcgctgggccgtggccctggggaccctcatccgcccctggggaccagcccaggtgcctggcttccgcttcctccgtcttctctcccccctccccccaccccactcccaggatcccgttttcacaactgttgcggcttgtctggggaggccgcattgctcctgaggctccagtccgcagggcagaaatcaggcctgagggaggggccgcagccacagctcccgtggcctccaaggtggcagccggccctgggtggactctgacctctcgccacctcgccacacctgaacttgccccctggggtagggcggtcccgcaggggccccttcacaggctgataagggtgattaatggcccgttagcatggcccaaggtgagttatggggcagctccaggctgggtgacaactttatcaatgtaacccttttgccgccgcccccccaccgccattctaaattgagttgattctacttaccccacccccacctcacctgaaggatcccttaaatcagctgaaaccgtcagattcggctgggagaggtgcagctaattaccgtcctatgcagtggtttattacctgctatgctggtgccatggtctctaccaccctgcgtgtctgaggtggcttcctttctgctctgcaaggccccagggcctgagggtgcagggggctcagggcagcctgggaaaggcattgttcacacacatccagcccaagtccaagagcacatggggggacgtgagagtttaacttgtcctttttctgtgtcagtgaaagaagagcctgggcttctctctgaccctgaagcgtcctgggaagcctgcgagggtacagcctgggggaaaggccctgcagaagtggggctggagtggatggaaactgggaggcagggcagggggctgtgtcccccatctcggggtccctggctcagcatgagaacaggtggctctggggaccctgctgtcatcagaaatgacttctattgtgctgaggctttaggctgaaacttaaattccagtaggagacgaaacatcacaaattttagaaggacacactcagacgctgccttaaccccaagttaaacagaggggtcttcttaccttggagacccagaggagccggaccaagccagggccccttccccacccacccctgccctttggacctggttctgcccggggcagcgcggccctcagccttgagctccaggcctggccgtttggtttcctcttttgcaatgggagataatgagtctcacgtgctgcgtggttcaggggtgaggtggggtgagggcgcagccgtgaggcacagctctgggtaccgagggtgaggtggggtgagagcggagcagtcaggcacagctctgggcacccggcgtgagaacccacgtccagggcttggctgctctttactaggtgtgggaacgagggaccagtcagggtggtgggaacccagcgaccagggtagggggcccctgggcagacacctgcctctgaagtggtatcatggcacctgcaggggtcagggtgcacaggtgctgccctggaaccagcaccccttctccacaaccgaaccgacgccacagggtgcccagggcagcccctccgttgtggccacccaagcaactcccacagcagggtgcaaggggaggccgtgcagacaggacacctctcgcaggcgcctagttctgcagcaggatttattggctacattaccagctttataggagccagatggtggcgtcaataaaccctgtccataatcttcaggtgggtgcaatattgagttaattaaattgtgctgctctattaggagagaaaaatagatcagctctgagccctggttagcctcttctgctttaaacacgaacacacacctcagcaaagtctgtggtaattggtttgggcggggagttctctcttccacacagccacgccgcctccctcctaagatacctgccaaacctcgttaccacgattctcatcagctgggcttatgcatgctagtgagccgggtggcggggttcccctccagtgtaaaagagggcaactctcctgggtgctgggactccttgggacccttcccgaggcctggctcctcgcttctgtgacatcatgctgtgcccccctcttcctgagccctatctccctgtagctaggtgcccaatggcctgagcatacctccctctcgtggtgcaggttgagtgctcccggctccgagggccagctctgaggtcctgcatgcccagcggtgtccctgtgcgggcattggggggctgggctctgcagctgctcctctgcataacggtgtccaggccgggccccaggtgggccctgaatccctcaaatagaggggggatcttccctggcttcttggggcccagtcctgctctagagccagaagaaggctctggggagagtgagggcctcatgtgcccagtgggggccgcggtggaggtccctaaggcctatctggctggtggaaattttccgcaggaggtgggcccctcgtggaaggtggtatctccccaccttatctaagaagccacctgctgttagagaaagcgcctgccctgggggtggggctggtgggcagcagggtggggcagccaggtcccaggagaaggttgtagatccactagcatcccgggctcgtgttccatgagactacttctctggtgggggcactggcttcctggggccgactgtgatcccacagctgcgtggaccgtgggggtcccagctgggaccactgagcagcagtgccgagcctccccctcctgcctcactaccacagcaggttccaggttggccttgagacagtgtgtgttcagccttgtactgcggggtggaggcgggaaggagggtcatgcaggaaagaaggagaaaggcaggggtgtgtgctcgtggagatgtggcattccccctccctggctccgacaccgggctgtcctctaccaaacaccagccgcgtgtgcaggaacccctcgagcctgcgcgctgctgctgcgcttgtcaccctcgcttacagaatgctcgccaggcgccacgtgctctgcagcctccacgattctcctgcatggatccccacactagccatccaggtagtatcacccccaccaggccacgtcggaaaataaggcaccacactcttttttttaatttaatttaatttaattattattattattatactttaagttttagggtacatgtgcacaatgtacaggttagttacatatgtatacatgtgccatgctggtgtgctgtacccaataactcgtcatttagcattaggtatatctcctaatgctatccctccccccctccccccaccccacaacagtccccagagtgtgatgttccccttcctgtgtccatgtgtttttattgttcaattcccacctatgagtgagaacatgtggtgtttggttttttgtccttgcgatagtttattgagaatgatgatttccaatttcatccatgtccctacaaaggacatgaactcatcattttttatggctgcatagtattccatggtgtatatgtgccacattttcttaatccagtctatcattgttggacatttgggttggttccaagtctttgctattgtgaacagtgctgcaataaacatacgtgtgcatgtgtctttatggtagcatgatttatagtcctttgggtatatacccagtaatgggatggctgggtcaaatggtatttctagttctagatccctgaggaattgccacactgacttccacaatggttgaactagtttacagtcccaccaacagtgtaaaagtgttcctatttctccacatcctctccagcacctgttgtttcctgactttttaatgattgccattctgactggtgtgagatggtatctcattgtggttttgatttgtatttctctgatggctggtgatggtgcgcattttttcatgtgttttttggctgcataaatgtcttcttttgagaagtgtctgttcatgtccttcacccactttttgatggggttgttttttttcttgtaaatttgtttgagttcattgtagattttggatattagccctttgtcaaatgagtaggttgcgaaaattttctcccattttgtaagttgcctgttcactctgatggtagtttcttttgctgtgcagaagctctttagtttaattagatcccatttgtcaattttggcttttgttgcacaaaacaaaagggatgccctctctcaccactcctattcaacatagtgttggaagttctggccagggcagttaggcaggagaaggaaataaagggtattcaattaggaaaagaggaagtcaaattgtccctgtttgcagatgacatgattgtatatctagaaaaccccattgtctcagcccaaaatctccttaagctgataagcaacttcagcaaagtctcaggatacaaaatcaatgtacaaaaatcacaagcattcttatataccaataacagacagagagccaaatcatgagtgaattcccattcacaattgcttcaaagagaataaagtacctaggaatccaacttacaagggacatgaaggacctcttcaaggagaactacaaaccactgctcaatgaaataaaagaggatacaaagaaatggaagaacattccatgctcatggataggaagaatcaatatcgtgaaaatggccatactgcccaaggtaatttatagattcaatgccatccccatcaagctaccaatgactttcttcacagaattggaaaaaactactttaaagttcatatggaaccaaaaaagagcccgcatctccaagtcaatcctaagccaaaagaacaaagctggaggcatcatgctacctgacttcaaactataccacaaggctacagtaaccaaaacagcatggtactggaaccaaaacagagatatagatcgatggaacagaacagagccctcagaaataacgccgcatgtctacaactatctgatctttgacaaacctgagaaaaacaagcaatggggaaaggattccctatttaataaatggtgctgggaaaactggctagccatatgtagaaagctgaaactggatcccttccttacaccttatacaaaaattaattcaagatggattaaagacttaaacgttagacctaaaaccataaaaaccctagaagaaaacctaggcattaccattcaggacataggcatgggcaaggacttcatgtctaaaacaccacaagcaatggcaacaaaagccaccacactcttaaatgcaggagacggtttccaaatgcagcctgcagaccccacagtggggtcctgagggtcgcgtgcagcacacagcctcccagacggctctcaccacaaagccagggctgcccccgacacttcaggagcccagcccatgatggcactgagctgtcaacacagttgggctcagagagaggcaagacagtggggcggagtcctgggaggaggtgtggcattcatctgtggccacagtggcacggggagggggcgggagacacaagccatcccctaactctgtggctcgaaacagcacacggtgcccctccttatcgcattcaacttagctgctgtgggcaagcagcagggcttggtccaccctggcggttgggcccagtttgtcctgactgcctgccccccttggatgccagagctatctgggagttgtgaaatattcctggtggcagcagaagaagacagcagacacacatagtcctcatcctccttaggccttggctcagaatgaacccattgtcacttgtgcccaaagccaatcccgtggccgcaccgacacccgaagccaaccccgtggccgcactgacacccgaagccaaccccgtggccgcaccgacacctgaagccaatcccgtggccacaccaacagtacagggtggaacgagctccgcctctcaggggagggacaggattacgtggcagagagcaggtatgtggcacagtgacagcgcctcacctgggactgggactggagaacagctcaggccaccccttgcttttgctgatgctgagtaactggtagtgaggttaaccaggagggacgaggagaggagacatccggataagagaagataaactggcctgacccaaccagtctgagaaggctgcatgctccatgcctccaactccatggcactccagacaaagcaacactgtagaaggaccaaaatcatcaggggctgctgcgggctgggggtcggaatgagtgggcagggcatgggctcagggcaggggcagggctctgtgtggcactcccaaggtgggtccacgccccattctacattcatgcgtaaccatgacccctcaggtcagctgtggacttcgttaataataacgggctgatactcgttcatctattgtaacaagagtatcacaccaacgtaggtgttcatcacgggggaattgcggggagacagggagagaatgagtcaaggggaacaatgtactgtccacctgttttcctatgcacctgtcattgctctaaaaaataaagtcttcggtcgggcgtggtggctcatgcctgtaatcccagcactttgggaggccgaggcaggcggatcatgaggtcaggagatcaagaccatcctggctaacacggtgaaaccccatctctactaaaaatacaaaaattagccgggcatggtggcgggcgcctgtagtcccagctactagggaggctgaggcaggagaatggcgtgaacccaggaggcagagcttgcagtgagccgagatggcaccactgcactccagcctgggcgacagagtgcgactccatctcaaaataaataaataaataaataaagtcttcattaaaaaagagttttctggaagtggcacatcgtatgcaaacacatgcacatgcataaggacacacgtgtctgaaaaggctgattggaaatagttttgaatgataatatgccttattgctgagataatggatggtttttttaaatgaacaccgatgggggtgttttacttgttaatacgttaagtgacgcacgtagggctgtgctggcctgcagcaaacactcagtaagtggcgaaggtagtcaatgaacactggtagtacctggcaggccgcggagggctcttcgagttggttggattctaaaatccttgtggtccagggttgtggatcattccttcatgtgtgtgggtgccactggcacagctgaccccagtttctggctctctgccttccaggaacgaggtaggatgagactctctgcccacctggggttgggtggagcatcaggccggtgagtatgagggagggcactgctgctctaggccgggcaccagctgctggtgtggtccctccagagttctctgctctccaacactgcaaccagagagtcccagagagctcctcaagtttttaccacaagcagagctgccctgccaagtcacactgggcttaggaaaaaaataaaagtcacatgtttatttaggaaaaataagactttgttacttggttaagacaatgagttttagaagctgtttgttacattggcataaaccttgctcaccctgactgatctgcttagtgagttccttgtgtctgattcaattctacttttcaaaacatccctcatttattcattcactcactcattcattcaacaaatacgcctgccttggggtcttgcaggctggcgtttgaagacacttctccatttaatagtgctgccaggatacaaccaaccacacatcggagcccgcacagtcggagggctgattcactgtgatgccattttatataagaaacttgagcatccttggatttgggtacctacagtgggaggaggtgagtgagaaccagtgtccccaccacagggacagctgtgtctaggaagcacctactgtgggtggggagctgtcctgggtgctggagacatgaggttggattccaccaacctcaccagactcctcctggagtctgaattcttctgggacctcagttccctgcaacaaggacctcttaggcctttgcttttggtgccccagttccctggggacctccagctgtgaggatccaaatcagatcatcacagaccttggaggggtggggaaggcaagtatctaccgtcctgctgcactgagatgcccgtgtcctcctgcggtgggcttggctgcatccctgtactttgcagattctgaggagtcccttctcagggctattcctcttctcatctgttatctatgggggggatattgtgaggataacaaattgagtttggccagaaagagtgggattcttaatgtaacagattccgtgtgagtgtaccgttttcttattgagtaatatttccctctttgaataatactctctttcagcgttggcctcttcttatgctaacgggattcattactccacctgacacccacttccatcagccagggctgcattgggaaactgtttcttcttgcccagttaacaagatgtttctccagtatagtgttgataaattaagtaataaaaagcaagacgtattattttatgttggaacctcgcctctgttatttctgagcaacggccaagactcagattattagccacagaaatgtttgcattgcctgggatggaaaattatcacataaaaagagtctggtctggtgttcatcacagatcagctgagaggaagcggagatatttggagaaaaaagcatccactgtagccggctcacgcacaccgggttagaggggaaggggtgagcgcgcggcggcttctgccggggaacaggctccctgctcgagccaggccagggctttcttcttgcctcccaaacctgaggctctgggttaccaaggccccaaaagggcagataattatcggaagagaatctgaagcctgggcaccccagagagctgcaaaaataaaatgaggaggaggacttttgaatagatttcctccctttgtatttctgttttggacgagaaatgcagaggcgggagcaaaagggaactggcaaggtggagaaagcagcaaattaggccagaaggaaggcctggattggcgggcaccctgggtcggtggggagctgcagggatgagcagtacctccgtcccggcccttctgcccacacacagcccttcagtagttcacaccggcccaaggggaggctcgagtcaccctcagcttacccacgaggagggtccaggcaggcgccggaagcagaagatcccagggattccctccaggggctgcagctggggctggggagacatcgcctgggcctcgttcaccatgatgactgtgcctgggcgtggcagcaccctccgtgtgcaaagtcaggccatattgggctcaggcctgggtggtagaggccaccccttgcagctcgccaagggatgatcttagggcacaactggtgagttctgggggccacacagcagccctgtgaggcagctgcctttcttcccctccacataatcatgagaaaactgcattcaagcaggtaaactcaccacccaaggccacataggcagtaagcggcaaatcaggcccccccaagaaagccctgaaacccagaccaactagtgaacaggaggctggggcaagaggggacccagtgaagtgttttgcagcgtagcctgcagccccgcatgctctgggctgtccaggtttctgaggttggaaagagtgtggtccccacaaccagccccaagcaagggacttctgcgtgagccacctccgtgggcctgggatgcgcctctccactgggcctgggatatgcctcccctctccatggtcaggtctggtcccagctgtccctccctcgttagtgcagcaggtgccgtctgtgtgtccctcatccaggcttccttacagggcacccaggatcttccattactaagctgtggccctcaaactctccccatagtatcctccaagccccctgcacttctttgggcccctggttttccagcatcacacacccttcccacctccccatacaactccagggaagacttgcatctcccctgcggtgtacccctcagagaccaccttctgaaaccccactctcaaaaagaaactctttgcttttcaaacagctttagttgtgtgaacccaagcaactacccacaccctggcctagcagggagcactcctgattgtctggattcctgtggttctggggggccaggccccaaggacagctccacaggcctttggggttttactcagctctaaccccacaggctgcctctctgctaagcctcttctgagctgcttccgagcccccatgagggtctgtccacaagcactttctgtgggcctgggagacttggtggtgaaaagaaattcctggaaggcaaagggctctgtaagaaaactcctttatcctactgacaccttaatttcttcgtctgtaaagtggaaataataacttttgcctcagagttatggtggtgactatacaagttgtggtgtgtaaagcaaacttaaaatagcacctggcacatgcttgagactcagagtgagatcaagatttgtgtgatgatgctggtgatgaggttgataatgaagatgaagatgatggtgaccatggtggtagtgattatgttaatgatgaaggaaatgatgatcatagctttgattatgatggtgttgatgatggtgatggtggtggggtgatgacggtgatggtgatggtggtgatgatgaggaagatgatgatttaggtgatgagggagatgatgatgatggcaatgatagtgatgatgataccattgatgatgacgatgatgatgatgagcctcaaggtcccatctagacacagtcattacatgggagaaccaaagagcccaggaaagggcagacatcaagggaccagaagaccccagaagcttcagttctggctccatcatcaaccagcgtgacctgggacaagtcacttaacctctcagggccttgttttctgccttggcaacagagggtagacactctgttccccactcaagttcctgggctagggaggaccccgggagataaggcatggaacagtgctcaggagagtccttcacaaacatgaggcattaacaagaaaaaaaaaaaaaaacaggaagaggcagaaagaaaactcttgaatgtccctcacgccctggtcctcttaggtgacctctcacacagagaagcgggccttggggagtgaataagaaatacaggacttcctgcgagatagcaagtgaattgtgagccgcgaattacttttttcctttgaaaaatgaggtagtcgggtcaaaatatttttgcatttcaaacacttgagttcctttgtccttggggcgagatgacttggtttccatgcagcctcacaatgcatggaaacatcttttagctgccagacggggcttctgataagccgccaattcatagtgtgggtttggagagctggagacggggtgagaaagctgaggcctttgcaaagtctatttacacagtggcgagagtccctttcaccctctccggcaaacaggccctggagcacaggcattgaacccagggggccgggtagatgacctgtacacacggcattgcccaccagcccacgcacacaccagacccacctaactgggttcctgggggagacctgcccagatacccctggagccagacccccagggacctcctccactcctcctgtgtcagggcagcctgcctcctgaaagaactggcgttcagcctgccccgccctccgtcctggtccccaccctccatcctggctccgttcagaaacgtgccccagggaccaggtttgctcagttgacaggttgtctggcctgcagcctgtgcagctcctggtcccatgggccatgaggcaataggaagagaaaggaaagagctgtcatcctaccccccaccctgtctcctttccttttctaagccacctgctctgctgcccttggagctgaatggaagcttccagtacaggtactttcagagggaaggactgaaaaatcagtcggcttgtttatttgactaatgcgccctcaggcacttgtgcttttagcaagtagtacccattctacaggtgaagaaattgggcacagagaggttcggtaatctgccgaagatcacacagcagtgaggggcattgaacccaggtgctctggctctgtgtgctaagcacagacatgaggctcctgtttgatccattaacgtgcatttgtgacccagttgcgtccctggactctgaagaccaagggctccctccttcccccagggactccacattattctggtaacatgggaatctgagggacagccccacacttgtgagtcaccaggagtccatctgaaggcaaagccagccagcgggaaaaattcaaccagaccgagcaggagtcttgccctggggcccccaaggaaccggcttcattcaagagcctgggatccacagtgtcacccttggcgggaggcgtggttggccagagcccctccctctgtgtcccccatctcctcctggttgcaggctattcctggccactcctctcctcaaaaccagatgatgaagttggagggatggggtccttgctgaggggttttggggaaggggtgcagcttgaaaagaacccacagagaaaaatcccacaggacacacatgtgctctttagtgggggaggcagttcagtgacgatgacagcagtaatgacaacacacagaaaacatgagggtgtgcgagcatggggtcccagggacgacacctgcggggtgctgccacgatggtgctgggaggtgcggggtgcagtaatgacaacacacagacaacacgagggtgtgcgcgcatggggtcccagggaggacacctgcggtgtgctgccgcgacggtgctgggaggtgcaggtgacagccaagcactggatccttgagagtgagtgattgtgcctccggcagggccatagagagggtctgtttcagatggaggtgccccggcggatgaggcatcgcaggggcaccagctcctctgggcatgcagcctctggttggtgatggctcagtgtgtaccccaggggctccacagaccctgcagcctgcctggcggcccctcccaccccgcacgggtctcaggcaccagcagcctcttccatttctgtcctcagttgctctgagtgcccggggatgggaaagcctggcctgagaacacggtgagctgaggctgagggccgggacactgtgtctaaggctctccccgccccgcccggctttgtcaaaggcctcacccccaggtgcagaaatatgaggggtagaccagaattctggggccatcccaagtagacagagcgtgccgctctcccgtggggccccccgcaggcctgctctagatgagaccacctgttggtggtgggaaccctggggggcctaaccctgtctagtggtccctgggcatctgtcctggtggccactcactgggatcgcactcacagagatcccagaagagcccagcctgaatgcagccaacagtggcacaggctgccagagtccctgagctcttccatcccatggggaactttccccaaggcacacggcccatatgtccgggccacagctctctgctggctcctgcccatgctgccctgcagatgccagacctgactgggctcctccaggccctcacagccctgaccacaactccagggaggctgcctggacggcaagatggataccaaaggaggtgtctcatctaatagttggaacgtgaagccaggagaagcctttgccacccattagaaaagcgacccctgggcaggtggcgcaggtgggggtatggcggcaccattcactcactcctttgtttctgtggttgctgggtccttccttcagtcgacgcctcttggagcctcctgtacgggcactcgccctctctgtgacccccacttcatccgagggttccagggctcagggaggggcaggactttgcccaaagctactgtgcagctgagcagactcctggccatcttccacaagcttagggagcataggtttccaaggccaaggctgtgaacagtcaggcccttccccagagcccaccatcccctggaagaagcgaataaaaagcagagaaatagcaatgacacgagcagttacaataacaggtgctatggagtccgaaaatggggcgctgtgtgacctggggcctctctgcggaggggccttaagggagtccatgaggctgagccggagcaggatatggagcagagctgagccttccaggtggagggagcagcatatccaaggaccccgggccagaagggaggcaggggaggggtgtggaggggcatccgaggaccctgggccaggaggggaggaaaggggagaggcatagaggagcatccgaggaccctaggccaggaggagaggaaaggggagaggcatagaggagcatccgaggaccctaggccaggaggagaggaaaggggagaggcgcagaggggcatctgagaaccccgggccaggagggaggcaggggaggggcatggagggacatctgaggaccccgggccaggaggagcggaaaggggaggggtgtagatgggcacccgaggaccccgggccaggaggggaggaaaggggaggggcgtggaggggcatctgaggaccccaggccaggagggaggcaggggaggggcgtggagggggcttgcaggtcccatgtgcgtgagtccctggggtgctgacaggagggggctgcagacagccaagggcagaggggcttggacaaggatggaacagaagataacaaacagacatatttgggacatctcagaaggagaaggatcaggctatggaaatagggtccaaggacagtggggatgggctcattggcagggatgggaagcccagaagcccagggcaagggactgggcagtggagatggaaatggaggcggtggatatcagaggaggggtcaagcagacagatgcagatttctgagcacagagaaacctgagctgagccactgagtcccccagcctctctctgacccagggcccaggagggaggggagaccagcagggaggcgggaggcagccctggaatccctggtgccacctattgaggccgaggcgagcgggctgttaggactgggactgagggtggtggacagggatgagacaggagcagggctctgggtccggagaaattgcaaccatggcttgacaacagcttgtcccttacggttgggacagaagcctcagggtgcagggggagcggacaggaatgcaggtgtgggtgggaaggggctgaaaacggacaggagctagagggctaagctgctaggcacagctcatggggaggcctgacgggcctgagactgatgatgtgaagggcctagtaggggctgaggtcctgtcccagtagggggttggggagggacttggaggcttcccggtgggaaggtgagttgccctgcctgcttttcgctgccaggagaaggcagatgcagggatgtgtgactcaagggacccatccgaggttcatgggaagaggagaaggggtcgtcctggtgggagagggagaagcagaccgcagaggcccctcttgggtctgggagctcctaaaattgcagccaaggccagccctcttgccccggggctgcctgggtttgtcctgggaaggtgaggatgggagctgactgtggttaatcaggaggtcacagttagccccagccagacaggcattatccagctggcacctcacgctctgtcctcaccgcccagaccctaggagcccccagaccctgcctcagtgggtcgtgcccaggtccttcgctctctatgatccctttacggtcgtgcagtgctccccagggctccgcactgctccccagggttccttggtgcgtgtctcataaagcccaggagggcgaggccaggcccagcccccaactcaagggccgccctccagcctagcgacgccacctggcccctctttccattaagtctccgtcgtcttgagtccatccagggcggtgtgcggccggtcgcttagtcagcaagaaccctgtgagctgcagtcatcataaatgcatatttaataactattttcttcctggggaaaatgtgctgcttcagaagttcagaaatgggcttcgctcttcagctggtaatgagaagttaataaaagtgggattttgtgcaacgctggccctctgacatcttaatctttattaaagagacgtaaacttccacggatcgggcgggcctgcctggcacagccggacgccaggagagccgggcaggggtggcccaaggccggccgagcacccgtaatccaccagagaacaatgcgcgccggagccttttcgccccgagagcccctcgcacttacctcagtagacgcgaattaattctctccccctgagagccccagagagactggggaggaccgagcggttcgcatttgcaaagctcttaatcagtgaactgcgttggaggcattgctgctccgctcctccgacgaggagagggccccaggggcaggagccactccctggatctcagacccgcttgtctcgcaggcgggaggcacgggcctgcaccctccgccgctcccacgctccagcagaccacggtggggcatgcattttatttttatttatttatttatgtttgagacggagtcttgctcttgttgcccaggctggagtgcaacggcgcaatctcagctcactgcaacctctgcctcccagggtcaaacaattctcttgcctcagcctcctgagtagctgggattacaggcaaccgcccccacgcccggctaatatttttgtatttttagtagagaccggattttgccgtgttgtccaggctgctctcgaactcctgacctcaggtgatccatccgcctcgacttccgaaagtgctgggattacaggtgtgagccaccgcgcccggccacgtgcattttagagccatctccttttctttcttttcttaaaccagtgtgaaatgtacaaaacgtataactaattattctaaaatggacagtcagcagtatctagtacattcggtattttgcagccgcctctgtctagttctggagcatctttgcttgccctgaaggagaccctgtacccgtgagcagccacgcccatcccctctcttccagccctaggcaaccacaagtctgtcttctctctttctgcatctgctcttctggacatttcatctcatggagtcatgcagcgtgtggctcttatggctaaaatgttcactgaacataatgttttcagtgtttatccatgttgtagctcgtgtcggagctctgtgcctttttctggctgagtaatattcccctgcgtggaggggccacaccttttctatccactcgtccctgaccggaggacgtgaggcttgtttgcacctgtgggtgttgtgaatcgtgttgctctgggtacgtgtgtacaaggatcgattcccgtggagagcgccctgggtctgggatggctgggtcacaataacgctatgtctcactttttggggaacctccagactgtttaccacagtggctataccatttcacatcccggggtgcctgtgttcgtttgactcagagctgctcagaaacgaggagcggcctcacagagcggctgaaggggcggcccctcccgcaccagggtgattccagcccctgcccctccttctgaaagttgagcagagcgccagcctctccctcagtgagccgcttctccatcccgcgccgctgcgggtccacagtgggtgtcggtggcagcattggctcccaggcccacaggaagcctccctggttcacaggacacaggtccatgacgtggatcctaagccgagtcagaagtggaatccaagccaggatggaggtggaaaccctgaggagtccgccctgttgttttggctttgttgtgacagggggtggatctgcctgccgttcgcaagcaacgcgggtgcaaaacagccaacctgggtgcagacctcaggggcctgcggaccacggctccccggccctcaaaccatgacccccgaatctaacagggtgcccgtttgcacacacgtgggagcgtacggtgagcaggtcctagacttcggctggcccactggtctcaggagaagggcccgacgctcctgctgcggttgcagtcgcccccggctcggcgcgcgtcagaccaggtgcgcgtggaagtgtgtttgtctccgctaatccacgggggaaggagaagggcagagtctttgtcaggctccgagcaattaggataattaaaaaagaaggcttattgggtaaacatgctctgggattgtgaccccttaattaatggactacggggagaaattacagcagtggcaggataattaacgtgtgcacttcgcaaagccggtagaccagggtgttggaggacgggatggccaggctggtgcagggcggccggggagggcagacgggccctgcgaggggcgaggctcatgggcaacagtgggcagcctggcaggccctggcaacttggggcaggtcacaggaagccttcaccctcattcctatagctagcttaaaaaaatccatcactctcagcagaaaccacagctgcccctgcagcaccccttccccagctgtctgccttagcagaggcacaagggtgtgggaaccccagagttccctgaagaagggcttcttacccctaaccccagcctcagagtccattggggtcactagagtattctaatattcctggtatattcgaggagggcagccgtgagccatgacccagtccaggggctcccagcctgccccaccgcatgcctcagggtgaggggcagcgtgggaggcttccccatgctgcgccaagccaacttcagctgctgtattttcatttcgctttacctgaggtggccccatgacctgggggtccttccaaaggttcccacccccagggagcctgtccaggcccccagatccttgataggcactgcagaggcagtgagtcttggagacaggcgtctcgggcttgtttcttgctcccaggtggggaacagaagacaggtgggtgggctttgggatgggctttagaaggtggctccaggccagagagcaatggccatggccactgggcttctcaggaccgaggctggttcagtcccaaggagcaggcagtggctggggtaccagatggacagctgggaggaggaggacggccccagaggaacacaatcccggaggaggacagtcggggagaagcgcagcccagagtaggacagtcaggaggacagtcccagaggaggacagttgggaggagcacagtcaggaggagcagtcaggaggaggacagtcccagaggaggacagtcccggaggaggacagtcgggaggaggacagtcccagaggagcacagtcccagagaatgacagggaggaggacagtcccagaggaggaaagtcccagaggaggacagtccaggaggaggacagttgggaggaggacagtcggggaggagcacagtcctggaagacagtcccagaggaggacagtcccggaggaggacagtcgggaggaggacagtcccagaggagcacagtcccagaggagcacagtcccggaggaggacagttgggaggaggacagtcccagagtaggacagttgggagaaggacagtcaggaggagcacagtcccggaggaggacagttgggaggacagtcaggaggagcatagtcctggaggaggacagtcccagaggaggaaagtctcagaggaggacagtcccagagaatgacagggaggaggacagtcccagaggatgaaagtcccagaggaggaaagtcccagaggaggaaagtcccagaggaggaaagtcccagaggaggacagtccaggaggaggacaatcgggaggaggacagtcaggaggaggacagtcagaaggaggacagttccagaggaggacagtcaggggagcatagtcccagaggaggacagtcagggaggactgtcctggaagaggtgagtcccggaggatgacagtcccagaggacagtcccagaggatgacagtcagggaggatgacagtcggagaggaggacagtcggggaggagtacagtcccggaggaggacagtcgggagaatagtcctggaggaggacagtcggggaagacagtcccggaggaggacagtcccagaggaggacagtcaggaggaggacagtccaggagaaggacaggaggagcacagtcccggaggaggacagtggggaagaggacagtcccagaggagcacagtccaagaggatgacagtcagggaagaggacagtcccggaggaggacagtcaggaggaggacagccaggaggaggacagtcaggaggaggacagtcccagaggaggacagtcccagaggagcacagtccagaaggaggacagtcggcgaggaggacagtcggggaggacagttccagaggaggacagtcccgggggaggacaatcaggcggaagacagtcctggaggaagacagtcaagaggagcatagtcctggaggaggacagtcgagaggaggacagtcgggaggaggacagtcctggatgaggacagttgggtaggacagtcccagaggagaacagtcaggaggaggacagtcccagaggaggacagtcggggaggacagtcccggaggaggacagtcgggaggaggacagtcccaaaggatgacagtcaggaggaggacagtcctggaggaggacagtcccagaggaggagagtcgggaggaggacagtcccaggggaggaaagtcgggaggagtacaatcctggaggaggacagtggggaggaggacagtccaggaggaggaccgttgggaggagggcagtacagaggaggacagtgggggaggacggcagttccagaggggcagttccagaggagcagtcccagaggaggacagtgtgggccctgttcgctgagtctgccagggcctcccagaggcagaccttggtgtctgccacgctcctcccagtcccggctgtggccggcctgcctgccccgccacgtgcatgcaggggatatgcggtgggaggaaatgctggagattttcaagggcagagactggacattcacgccagtgtggggccccggacgcctccaggtcagaatgaaagccccagtcctcttatacagatatccctcgaggaaggaacgaagcatttccgccaatcaaggaggctacttcccacagctaaacagagcctggctctgcaagatgtctaagagccctggaggcagagtgaggcttcctgaaagacccttttcttcctagcagagcctccctgggtctcccacagtggggaacagtgactaagggaagtttggggtgaagaattcactcttaagccactcccagccaaatccaaaacataaagaaaatggtagcccttaggagctcaacccagtgagaacccaaggccgttgtcctgcagcggacgtggaaattctgaccctgtgagctgcccttgggggtgaacccatctagaacctgttccatgacctggagcgtgaggccaggcagggggactgtctgggtagtccaggggccctggcagagaaccaagggcttgcatttctcagctttggctcggggcaagcccaggctgcctggtgatgtcagctggaggggcacctggtggcaggaaaagctcctgcctcagaggccagagatgatcctggcatcaccttggctggcacgggaccatctctgacccccagcacggaaagcagcagcaggccgcggagtcctgggcacagggctcccttctctcttctgctcccatctggggatgtctccccactaccacctgcacacaccaccctcaccgtctgtcttgcaggtaggataaggtgcctgatcacaagaccacacattgccctgggacacacagaatgagacagcttctcccagccatgaaagcacctgtcagctgtctaccaggggctgcctgggttgggacacggtgcccacatgggtgtcaggaggacaagaacttccggtgcttgcagacgcttccagaggtggctggtggccaggcagtgctcaaaccccagggaatctggctcacggtttcctccagggcgaattggcaaggcccaggggctctcagaccggatcctgctcatcctgcatctgcagcactccacggggacaggcgtgtggtgagaaggtggcaacagagttggctgtagtcgggcgctttaaggcccatctagagaggtaggggctctgtagggggctctccgtgggggctctttaggttcccatggtctctgaggccaaggctggatgtgttttttgtttgcagctctcagggcacagagaaatccataccccggcccacaggcacgcgctggactctgtcctgggcacggcggctagagtcgtgcagcctctgctgtgaggctccttccgggacctcggggaggctcgcactgggggctcgggaaacacccgcctcctggggctccattctccaaagggacgtcccgccagtgagcctggggacattcatgctccaccccagctcccgtgtgcaggtccccgggtaacctgtgtgttggctgcatcgcctcagttctgcattcgttcaggaagattcgaaagttccctatgagatgcctgtgagccccaccaccactcggagctctgcctgaatgtggggttgggggccagccttccaggcctggaacaaggtgggcgaggccgagcccatctctggagctgccctgtgcccccacagggagggctggctcccctgctgcctgtgccgatgaaggggacacagaggcctggtggcttcacggctctgccactccccagcctgggctctgagggccggaccactctgagtctcgagtcttgtgtctgccacatggtggggacctggtcatgggaccgtcctggggggcttacctgaggctgcagttacactagtgctgtggtcgagagggcagccggagtctgcgtgggagaggatgtgcgttcagaaccagaagctggtgcagaaagcagagagaggaagaaaggcccagaaacagggaggatcccaggggcagtggggagcaggagcagggatgaggtgggctccatggcagagcaggtttttacccagctcttaaccatcccccaacgctggtttctttgttgggtatggggaggctgcctccccagggcaccaaccttggatcaccaccccagtgcccagaagaaagcctgttctgccattcgaggtgccttctgggcaggagtggggagcagcagtgacacttccacatctcttatgatcctacccatggtgcccttggcatactctgatctgtgtgtggaggaggtgcacatatgagggtgcgtgcacatgtgtgtgtgtgggtgggtgggtgtgagtgaatgtgtgtgcacatgcatatatgagctgcatctataagggtacatgtccatgtgtgtacgtgggtgggtatatgggggctgcatatataagggtacatgcccatgtgtgcacatgtgtgggtaggtgtgtgtgtatgtacgggcacgtaagtgtgtgtgtgcatgcatgtgtgtgtatggcctgcatctatgagggtacattcctgtgtgtgtgtgcatgtggcaggtgtgtgtgcatgggtgagcatgtaagcacatgtgtgtgcatggataggtgtgtgggggttgcatatataagggtatatgcctttgtgtgcatagcgtgtggctaactgcataggcatgtaagtgtgtgtgtgtgtgtgtgtgtgtgtgtgtgtgtatgggctgcttatatgggggtgccagcctacgtgtgggtaggtgcgtgtgcacgtgtggcatgtaagtgttgtgtgcgtgtgtcccaggcaccgttctctcaccgtggacttggtatggggaggtaaaaaaaaaaaaaaaaaaaaaaagccactgaaagggaaccagccgcatccatctctgatgggtgaattaggatccaaatttttaactaattgagtacattaaatagaaagtccctaagaaagaagggaggaaaagacgaatacaagacacttttcaaagcttctttaataaaaagtgtatttgggatttgaccatgatggctatccttgcttgccaaaacctgacgccctggcaggtaactttcatcaggcatctctgaaatggtacctaaatgaattagcaataaaatggacttaggccgagcagtgggggcctccattaatcttgggttaatcactaaagaggtgccattcacttttcttaagaagtcacatttctctccccttgctggcgaccagatttcataaagtaacatatttctaatgaaaggtctctgcttgaattaaaccctgaaggtttatgcagattttgcgtttgattactgctggcatgggctcttagccggctgcggaaggaaggtccgttctgaaagggccccagcgtgcagttcataatattctttgaaataaaatagtgcacttgtgcttagtggctttaatcagccctgacttttgatagtcaaacaatagctaattacagtagcacctgccttccaggctctgtcacgtcggctcctgccggagcgaggccttgtctgcgagctgcgtgattattacagactctgtctgcacaaagtcgctggagctgacacccagcaagtttggtagccattagggaaggtttattttgctgctgcatggctggcttttccattaccttcttctcctttgtatgtttgggggcagtggtgtcgagggcatggaggcatgaggaggcatgttagggtgtgggtcccgggtcctgagacagccggctttggacacatggcacctgctcaaggcgttcttgctctggggatgcaggatgcacagatatgctgggaacttgctcgagatttgagaagggtgttgtgaatgcttgccatgtaccgacagcaaggttggactctgagcatcccccagcccagcaggagcacggatctggctggctcccaggtgcgcctggcagagccattctggacgcttaggtgaaatgtgccgccaggcactgggagcaggaggcgggcccagtggaagtcataaattactatctcatcatataagtctttcctttctcattaattttgcctggtaaatgaacctgagtttgccagaatccagccaagtgagtaacatcggcctgtcagccatgggcttgacagaccttgtacgtaacaagttcccggaaaggatcaaccggatatcgggaatgaaaaagtgggggcaccccgtcccatagacacaggccaacccagccttcgctccttcctgcctgcctgtctctccctggcccctctgcccacccctaccccgctgcaggacacccccaagatgaaagggcaaggagaaggagggcctgggggacctggctaccaggacttccggacaaacagttgtcaggcactcggcatgccccgaggtgggggggttcaggacgggtcaccctgtcctggtgcaggcagcactcctcggtgggggcagttttgggcacagtgctcgaaccaaacgccagagccggtcctgcccagtgctccagttccctcaagaactccatccggtcccctccaggagagaccgggcagggctcaaagggaccttcctcctggactttaggtgaccttttgctgagggtgacgtgagaaccaccagtgagagccaggggggcgggaggggagtcattccaaactggggagagccgtgcacatccagcgtggaagtgggtggcacccagccaggccctagtctcttctcgtggggccagcgtctgaagatgccctcccaagccattcacattgcggccaagaccatgtttccctttctctgtgacccagctgcgccctgtgggtctgtgcactccagcacacgcgtgcctgctgcggcctccccggtctctctcacgccgtgggtgccatttccgctctgccggctttggtctccggacaccacgtcgtgttgacaattacccacagccaggacttgccaaaacctggagttgaaagggcttcaaggggggagaaaccaactggaaagctgttttctgttaaggcaggtttatttttccttgcaattatgtctgactaaaatgtccttgtgcgggagtcacttcccaagagaggtctgattcatcctgccctgggcagccccccggcccccgccatcctcgccaggcctgccattgggcccgcggtgggagtcctggtctcagcaccgcagactccagcagcgaccaggcctcttgaggggctctgtgggtccatcccaggatggaaagcacccctgaacctctgggagctcaggaggggagcgtggactctgctcgtgcccggccctgagctgcctctgctgtgggagcctctcatacctacatgaagtcagctgcatgaagactggccagcgacccggacccgcccgcaggaaggccccacggccctaactccgccggtgtctgaccccgagctgtcccagcccatggcctagaggaagcccagggttcacatcccagggaagctgcagggccttggcagcatgttcagctcgtcggccccagccagctcgaggtgccgtgaacagagccagcgaggggtgccgtgaacagagccagcgaggggtgcctgtttcctcacggtttcccctttctccctggagaacagcgccagccgccttgtaaatcacccctttgccccgtctgacatctcctgttgcctgggccgcctcggcctggaccctgaggccaacctagtgatggaaagagagcgagccctaaagggggctgggcttggtcaagttcagcacttcctccgccatcttctccccatcccccatcacgaccccgggcagcgtctgcctctcgtccccgtggtgtttgccatcaccaatccgtttgattgatcatctcggtggccacaggttggtaataaagctggtttcagagcctcttgcatttcccccaggaccccgttggcatgacaggacttgacaccagccattcgtcacctgctgcctgtggtctctgcacaatgaccagcagacagacaagagccaggccaggaggaggcttcgggagaggctgggcctgtgctcagggctgagtgagactagtggacgtggccggccccatgcctctctgtgcacggctggatcttgcaaacagtcgagtcctggctgctgcgccacccggggatggcatcgtctgtcacacgcttcactctccctgtggcgcactggcatccaccatgcccacctcagaggccaggaggcacgtcagccgggaaggctgcagggaacccccaagcccaggccaccagggccctaccctgccatggggcgcacttgctcaggcctctcctcaccacagggtctctgggtgcctctgtgaagacaggatcccagtacaggaaagccccaggctggccccgaccctctccttttctgggaggaaaaatgggtttatgttgtgaatccgctgaagcccctgggacgttgtccagggacagggtcagtgaaaatgtctcaaaggtcggggactgggcacaacgaggcattgaccccagatgaatccacagagctcccggagcaggggaagtagcccttgttcacccacatgcacacacacacgcgcgcacacacgcacacgcacacacatgcacacacgcgcacacacacgcacacatatgcacacacaaacgcacagttgtgaacacgagcatatgcacatgcacacacgtgcacaggcacatgtgcataaccactgtgtaaacacacccaggcacaaacaggaacacagacccatacactcatgcacatgagcacacgcacttttccaacaccgtgaagtccgtgcatccgggagctctaggtcagcgatcattgctagcaggccatgggaccctctcatctgaaaaggagggagggcagggcaggggcttgtaaccaagaactgtgtctggggtcattcctaattcaagtctgagacagtgtgaaggcttcttctcattctcatggccatttccccaaccccacccaggtccctaaagccctatcatagcctggccttaccgtcctcgcctggttttccagcctcccaccctgcctggggcagagaagaccccctcaaggccatgctgcatctcctccagcatcccaaatcctccccatgggccatctcccacatggtgtggataaaggggcgtctttcctagggacagcctggctgcgcccttgcagccacacctaggcctaatactgtctggatggcaaacagggagctgaatgaaccccactgcacaggcaggaccccaggggcagcctgcagagtgtgggaggggcctgtgtggagttcacattcatgcaggatatttcagcagcagcacatttgctcacatcggcaaccccctcttctaagcacccacctaaagcgcagtcactagcaaatggaacatccctgtgctgggcatgaaacaggccctggaacctcagccgcacccggcaccctgctgcccggcggggcctgcagtcagccaggacacccggcagccacaaggccgccctctctggagcctgtggtctggttcggctagggtattgtgatctgaggacccttagaaaactggccacccgagaacttttccagtgtgactgctggcctctctggcagacgtgtccaaactcagaaaacctctgctgctctgaccacagggaacgtcagaggggacggggcagcggaacaaagcacaaagcgtccctgcgtcctctcaacgtggcccagctcctgcagacactcagcgagccgtggcctctcccatcctcccacgcttccctccggccggccctggagatccgtggagccacacggtgccgagcgcggcgctggccgtgtgctccgtgtctgtcatcgtcagccctgtccacctttggggcaggggcagctgggctggctccagtttctctccatgtcaactttgcaaaggaaggaggtggatgcagaagctgccaccaatagccacgtgggcagctgtggccccgagtccggggatgcagttggtcatcaggagcctcgaagcgtcgctcaccatgcctggaaagaccggcggcctctcctgcccaggcgcaggccctcggctcagcagaagccctgcagaagctggagcaggaggcatccctgggtccggcacagcctgtggtcaggccgcctctgcagcggggcagggtagatgttctcccctcagatctgaaacgcagagaggaagggcgggccctcgcggtgcctcggggcagctgtgctgagcagtgtcagccgctccgggcgagggaccaagtggccacactggccgcagagctgccctgcccggcggcgtcagtctgggacgccctgcacgcctgcccctgccaccaggctggcttccttctgagctgcctcggccggagaccccttgtgactgggctctctgtggatgacaaaaggaaagacttgagcaagaggctctgaggaaggtgccggcccctctccagactcctgtgccacaggctgaggacgggcagccgtcagggagagtctgtgctgcaggagggcagagggtcgggggagtggagctgaaggggatggtggaggaaggaaggcaggacaaaggggcctccaccgcctcctgcccctttccccattgcctgaggaccagagcctgcgggggggtggggacagggaagtggcctcctgggccagcatatccctgagccagtgtggagtggacaggcggcccctcctcccaccccccccgggcacccaccaccaatgtgggtccacaccattccccatgacgtcagccgagaagcatgagctcggtcaagacaaaacctcatggaatcccgagtcttttaaaagaaatattgatttattttccaatcacgataatgccatactttttttgtaaaacaagcagggtgaaaaaaaaaaaacatttaaataagaaagtcagaattatccatgagtcctctattgctgtgtggaagccagttatggtcagagagagacattcagcacccactgcatgggtagggggtggctgccccgagctggtcaccagcttagtgccaagtctgtggcttgttgaagccgactctgtgtgttcgtgtgttggtgtgtgcatgtgacgtgtgcacatgaatgtgcgcatgacctggtgtgtgtgcacgtgtgtgtgcatgcttgcagcccagtggctgtctcaggggacatgtcttcaagtgtgtggctccctgtctcacctggggcaggtatatctgggagggtgcagagttctctgtttgcacacagaggaagtggttttctgcctgagtccccccacccttactgccagcgtccaacctcacaccagagaaaagccagagtttcatgtgcggagggacggcgtacattccaacaaggtccgtccttcccacctcaggccttccatcgcctccctcgactcccacctggagcctggaggcagctggaagaacccacctctcaccccagcaaggtctgtggcgttaaggtcacactggcaccaactaagaactaagaccttctctgaggcatgaaggctgttgcttagctttgaaaacagtaaatgtgaatgaaagggaaccttgagaaagacccgttcctaggtgaagtgagaagcaggctagactggccgtcccgggccatacccaccctgtctccaaggggtctctgcccaggagaaatcaaagtggggttctcacagcccctggggcaggggcagggaaatttggtcagaaacaatgcggagcccccagggcttttgtcaaatctccatccatgggttttgttttctccccagttctgaatctgggaggccgagtggctgcccagcgaggttggctctgggctgaggacagcactgcctgggcctccttccctgggtggttgttcaacaccgggcaagtccctgcacctgtccagcctcagcccactgtctcaaaagtggggccattggcattctggactgtcaagaagcttgagaaactgggccctaggaggatgctgcaagatgcccagatgtcctcttcaactcgaaacgttgccatctgccttgctggctcacacccagcccctacctgagaacgcagctgtgggcactgtcgcccaggaggaggcctggctgctgagacgctcccttcctacagctgccggtggccagaaccctccacctgtgctccagaccaggctggcactgagacgcccaccccagccatggtcatttagaaataagtaggtgtccactatatgaaatcgaaatagggatcattcctgtgcctgccaataaaacaccaatctccttgagagaagcagccttgaaacttatcagtcattcacaacttagcatgatcagattgatgagctatgatcagattgattgattagctatgatcggtttgatgtgctctgattgggttcactgatgagctatggttagattcattgatgagttatgaccagattgattgatgagctatgatcagactgatgttctgtgatcaggttcattgatgagctatggttggattcattgacgagctatgaccagattgattgactagctatgatcggtttgatgtgctctgattgggttcattgatgagctatggttggattcacagattagctatggccggattgattgatgagctatggtccgatcgatgagttgctttcaggaaaccagggataaggagcaggcagacgccatccctgtaccagggggtgcagggtgctcagggagactggagccccagtctgcctggagctggcatgaggccaaggtgggcgcccgcagccctggatgtggaggggtgttctagaaggagtgctggcctgcaggaaaggccttgggctgcagtcaggtcagccatgaacccttcagtcaaacatgtgacctgaactgagaaccccaggtccagcctctaggtatgggacgccagctctctccttaccaccgaagcagctttgggcttgcacatgaaaagcttccgaaccttgactcccttcacaggcctgagcagtgagttcccagaatgttctagaagaggcatgtgctcagggaggccatgcttcagtgtgcagacgtttccccagagaggtcagcaggtgccgggcaccagcccttccccagacacaggctggccctgccagctggcttagcagggcgctgcctgtgtgtggagtgggggctctgggctccttgcttggcccccacaggtcctcgacccagagaccttgtccccccactgtcgggcttaggacaggccagggtcaccctcagcagaacctggggccagcgccgcagggccccctggtttggaaagcctgttcctcagctctgtcccagcgggcacttagctgaggatacccctgatgctgctccatgcacacctctcaccacgattcaatccacctgaggatggtcaccttctcagggaaatggggaaagacttattgccaaggtcactgaagccttcctggtcttggtgtctggaaaaaactcgccaagagagcaggcatctcccgagacccaggaatcagcatggccaccagagctggtcactgccactccgaagctcctcaggcagcttcctttctccctagggaggagacactgttgtccgtctgaagcctggcgaacgtgggacacaggaggcagccgtggccggaggggcacgagggtggtgggcagccagcgctagcccaagctcccggggtcactccaaggagtagtgagggctcccctgcaggtgcagtgagaggcgtggtagtattagggcggttagaggaggggcgtctcccttcccttccttctgagttttctttgacactgtcatctttcagtgcagagtcaatgctgcagaaggctccctgtgagacaggcgaggctgtgaggccgggtgggaggcagcgcttcccgagcaggtgcggggtgcgtcttcactctgcccctcccgacacttggttttggaggggtctgacccagtggccgggctcatgggtgggaactggccagccagcccctcgtcaccttccctcctgcttgggctccacagcatatcccaggcacagctgcccattagaggcggggctgtccctgcaatggaggtgccagggaatgtctgtccaggccttggccagggcccggggtggctgcaaatggccttaggccaatgaaggacacagctgccccccaaccttgttcattctccaatgcccctccctctgtccctctctccctccctccctcctgcagccagaccctggaggtgggctccatggcataggacagccccaggcagacccaactcacccactccccagagtggaaagaacagcctctgccccacactgcgcggtgcccctaggtccacagcagagacagacacacagaagagaggggacggacagcgaagggttacggggaccagacctcaaggtcagaggaagagagaggggacggtcagcaaagggttacggggaccagacctcaaggtcagaggaagagacagggggtggtcagcgaagggttatggggaccagacctcaaggtcagaggaagagagacggggcggtcagcgaagggttatggggaccagacctcaaggtcaaaggaagagtatatttcccgcctgcttcccccagcatcttccagcaaagccggctggtggtgttgcggccacacagcctccccgaccaacatccaagcctgcaaagctaagaggttaggatctgcaggagcccaggtgcctccgcgggaggaatgtggctcagattcgggggaccggtgcgcggtgtgtccaggagacgcaggcacatcgcagggttggaagtgcgctgggggcctggcctgtggtcctggctgggatgccgccatcctagggtagcgggcctgggggggcctggagctgggggccatcctcccatggcctgggcctggggcaggggctgctgcccgccacccgccacccgtagcccgcccgggaagctggggtggaggcgccctctatcgcctgcctgggggacatctcgccaaagcacaccggtttgcaaaggcaaaccgacattaagcgtcccaggttccccagacattatctgccttttgggaacctttaaaataaagagtcaaacgttttcggcccctgtctggctttttatgtaaactgagtggttcctggagtgtgttttttaaagtgttaagatggcagtatttatctggagggggagggaggaagagccaggtgggcgttctcctattaggccagaattttcagagaaaaccagtgtaaggcgtggccaaaatgatgagtttgtttcccggtggcctaggagtctgtccagagcaaagcaactgccaggtgggcttctcctggcactgtcgccgtgaagccttcgggagccaggacctgccagcagccagagttcagccctgcagggaaaggggcggccagggggagccccacaccctgagaacgtgggagtgcggtcttgatacagatcatcttcagatagactctgtggccttatgatggggaatctgagggttcattctcagccagagaggaggataaggggtgttgcttctagaaacggccatgcgtcttgggggcttcacggagcacctgtgagcctggggtggccaagcctgggaaacccagcgtggtcccgcccaggccagggcagagcagagaagggtcagagctggaggccgggctgaggagtctgcagccgccagggcagcttccgagcttggtgcacctactcaccacgctggcccttcctgggctgtaagccctgagtgacctgctcccctctgggcccgggctttcggaggcgaatgttggtaggtttctctggccggtatagcccttgagcatggaacgcttcacctggtgccctggacggggtgcaagggaggcaggctggcactctctggcccccccaagttctgggccagcccccagcatttcctgctgagagtcccaaggtccttggtgaggttttcagagcccactgggcaaacctagggtgaggtgggctgtgtggactgcagccaggagcaaagtctggcctggggcaccccagccctctggccccagccccgtggaggcccctgcctctcccctccagctggccacctgggcgttctgattacctctccaggtgtggctgggaaagcagctctgccctctgccctcaccccattgttccccaggctctgcctttcaggtcgttttacgttttcacctgatccctgtgatgctgcaaagcattcccaggccactgagcagccctgccacagccgctgtgtcgcccccactcacaaatctcgggacggacatgtcccctgccttcctgggagcaggcatgctcccaggaagctgtgacatgctcgctcgggagcttggagctgtgacatgctcgctcgggcttcttcgctcacacccgcgacatccacattggccgtggtcatagccagcctgagcccagggcgtgcttgagcccctccgtctctggtccctggacggccaaggtcagtttcctccccctggaaatggctagatgaaggtctgcttctccagatgccagccttgctcccaggccatggcagaggaaagcccccccaccaccggacacctggcatgtccacctggggaaagggcactggccctctctggcaagagcttctcagaccccagggtaggtggactttgtggttttcatctctgccgagcgtggagcccaatcaaagatccaggctccgctgacgagaaaacccagaaagcccctgcggcgtgacacaaggaaaaataaatatcaaaagaacatttgacgagctcaataaattgatcatattgtgctgaaccttcacccccataactatgggaccatttaaatgctaatgccattttttaaaaagtcaattacaggagtttgcaaggaatggagtcagcattccccacgacagcctctcctcctccagctccctctcctcatccacaggcactggggcctttgctcccctgaaggaaatgttccctcacagtggtcccagtaattgaatcaagttgatacagacaccaggaatattgcaagttgtgtgggtaatgggaagcacgtgttgataaagtggtcagtgtttgcggaccaaggggggccgcaactgcagttaacccttcagagagcacagcgtccccacagcccgaagggccgccccctgcctggcagagccccaggtgggtgacatgcaagcattccggaatcttccagccctgggttcctgtttcccatcagcacctgctctgctctgcagacggcaacatggccacaattctccctcctcttggtggcacctcctcaccaactggacccaaccgagcctgcagcctcctgaattgacatgcaggagaggagaaagaagaagacatggacccccagagaaagctggatgctcaggaaccccgtgtcctccataagggcctgagggcctgggggttcagccttctgcacccccaagttcctcccacaccaactgtgctggtggcaaaattctagtcaccattttcataccgacagcctctacgtgctgggcgcttaactcacaggagacctgcaagcctcactcggggaaacagaggcacacagagtggaggggccgcccagctcagatgcaagaggatggaaagcatgggactcaaagctgggtctgcccacccttcctgggtgctgggactcaaagctgggtctgcccacccttcctgggtgctgggactcaaagctgggtctgcccacccttcctgggtgctgggactcaaagctgggtctgcccaaccttcctgggtgctgagtctgcccacccttcctgggtgctggggccctgttcccctgaccctcattttcccacccttgatctggcccatgaggtcctgggggcctggagtcttcctggggtcagcaggaggcctgccccactggggcggcagcatggacgctgggaagtgggacctggacgcttgatgttgaaaccgtggtgcctccaggatgccctgagcgccgtaggagagctccacttcccagccacgcgggcatccaggattgcatttaccggggctggaggcgccccgccacgcgggcatccaggattgcatttaccggggctggagccgccccgccacgcgggcatccaggattgcatttaccggggctggagccgccccgccacgcgggcatccaggattgcatttaccggggctggagccgccccgccacgcgggcatccaggattgcatttaccggggctggagccgcccctgccacgcgggcatccaggattgcatttaccggggctggagccgccccgccacgcgggcatccaggattgcatttaccggggctggagccgccccctgccacgcgggcatccaggattgcatttaccggggctggagctgcccctgccatgcgggcatcgaggattgcatttaccggggctggagccgccccctgccacgtgggcatccaggattgcatttaccggggctggaaccgccccgccacgcggacatccaggattgcatttaccggggctggagctgcccctgccatgcgggcatcgaggattgcatttaccggggctggagccgccccctgccacgtgggcatccaggattgcatttaccgggactgcagccgccccgccacgcgggcatccaggattgcatttaccggggctggagccgccccctgcatggagcctcgcacaccctcaggtttctcaccccggctggggcagctgcatggccgcatttcacagggagagtgtaaactgctgagttacaggcagagccctgggctcaggggtgggcggaggccctgaccaagcccagggccatgggggctacaaggaggcaaggcccctaaagtcaggcagggccagctagctgcccggccataggagtctgtccacacagcgcatgacaaacagagtgcccaaggagccagctggtcttagcctggcagaggtgccagataatccagcactggaggctgtggctgtggaaggctggcctctgaccctcatgcccccaggcccagcacttgggacaagcagctgagacctaggggcctgcggtgaggaggtccctgggtgtcctgtgtggacccaggctcaggggcaaggccaggcagctgggacccttcccactccccgctctgtctctctccacctcagtttccagacaaaggccttctctgggctctatgtcccacggctggaagggaacgccctcaccttgagggctccagcctgctttttctgaatcccagggtcctggctgggaacgctcagatgttgagacctgagcctgtggccaggagtggtggcaaaagggtcctgtgggcccccagcccagctccagcccaagcgggggaccaatgcctgtgctcacctaggggtcctggtgggaccgaggccaccaccacccatagcccctcccccaccaccccaggggctctaaagatgcaaacctccaaggtgtagataagagagacccaagtcctgcagccaggaggggcagcctctccctgcaggagccaaagaagggcagaggggcagccagccctccctgccttgcagcagggagcagacatccctggaaggggcaggggccaaatgtcatgtgcagggtccaggctgccccttctgggggaggaagtagggcctcctgggtgttctcctcccacattgaccagtgcctgctgcccctgggtctttgaagcttcagaagttccctagagtggaagagcagaccaggggcctgccatccttgcgtgctcaccacctcctcacagggcctaggggcaggggaacttggctggctgcccatgagcccctggccgaagaccccaagccctgcagaggaggaggctgatgctgcatctggggtcccactgccttttccctcctgtgcttgtcgcccggcccctgctacagggctcaggtgggaacacctctgcgtggagggagacccaccagtgtggccacgggcaaggcccctgataaggtcacaggtggggaggaccagggctgctgagactgaggcccaagccccctgcctaggcccccagagattcctgggtgcgctggcagggagggggtcagcttggaaatctgcaggtgggcaagctctctggtgtcccgatgcccgccggagtctgaacgcagcccctgcaggtgccagatgggtgtctgtcgacaaattcacaagtacctgcctgcagcgagttcccacctgcagcttccccacgctgtttttgtttggtgcttccagaaatcatttcatcctcctcacccacactggtgcccaccctgtgccagggctgggggcttgggtgaaggaagcccagtcccagtgcccacagcccagcaggaggagacagacacattagcaaggcctgcgggcaggtcaggagctgggcgggtccacggtgagccccagagctgctggcagaagcgaggatggccttccaggggagggaacggcacaggcaaaggccctggggcaggacagcacggatgtgtccatggaacatgggacagccacggccttcacagctgctatgcctgtggtgtcggctctagttccagggcaaaggatggaaagaaggccggggccccgctcccacccaggagtcaggaccccactccctccagggcaccgagaccccactcctgcccggtcaccagaccccactccctccagggtgccaggatctcactcaatccaagtcaccagacctcaatccctccagggcaccgagaccccactcccaccccaggcgccaggaccccactcctgcctggggctgcccctgctgctgtgcctcccctggtggagcggtttctggctttaaaagtgtgctcgtgagcgcagggtgtttttcctgaatgaaaactcacagagtgcatgtgtcatgctgatgtgacaaacccgggcgctgttctcctgggtatcacaccctacgactccaaggctggcccggcacaggggctccccttgaggtgggcaggtttccaggcatttggaagtagacatgggaaggaaggagcgacggggtgggagggatctgcctgccagcccacagggctcaggggtcctcagaggtgtcgccccttccatgctcaaaatggctggaagaggagagcctctcagtatccccaccttatagatgaggaggcacagagagggggaaatttgccggttccccaaagagcctgctgcctccacctgctgtgttcgaagcggtgatttttctcttgaggcccctgtgtcctagcatttctgagctcaaaggaacctgtgtctggccagcccctcccatgctgaggacagaggtgaatgcttgggacagcgagaggtggcatcactgaagaagccccgtggctccggctccgtctgcaggatccctcccaggacgcagtggtgggcccaggccggccagcgctggctgaaggagcactgtccccacaacccagggaaacaacagggctccagggggacgtgcagggagtggaagaaactcaagccgggagctgtggatccaaaaatattgcagagtttcccgaggcaggccctacgagatccctgaaacgggatacgccgagctgaacttggccacataatgccgctctgtttgggaagggcccggagcactgggggcccgaggtatctttcaaagagtgatggttacggaaattagtggtgcagaaatccatactcatcattcatcgggggccttattaaccttcttacgatgtgataggagcggcttggcctcctgactccaggggcctgggagaggccatccttgtctccggcttggaggagagatgcaggaggatcgcccaggcagcaccggccccacccgcttccggaatccttggagacacgagtagcagtttcctgatgtgatacttaggtcatgaggcagggcgtggaccaggacgatgcacagctgagagcagcccacacggcctctctcggggtggcaataacactgcctcagagactggagagagccaggcccaggagaccccagtcagggcgttcccaggaacagggaacccagagaggcctgggcatcacacacacctgcgctcacagtggccccacctggacccctgggggacccacccttcttccccttctgcccctgtgttgcttcctctgcaccgcaggggccaggtagctgccatggagttgtctgcaggttaagggaggccaaggaaaggcatctgacctttggaagataccccaataaacaccatccgctgtcatcactgatccagcagctgaaacatggaagggccagctccaggggcccacaggcctcgcagaactcagagctccacactcctcccgcccctgcccatcccctcttgaaggggcctcaccaggccatgggctccctattaagtaatcacatcaatgtccattttaaataaggtctgaatgctatgaagcacccgtgttgggtcaaggcagctcttggcagtgcgggggagcttgttagaaatgcaagtcccctgaaccccagcactgggggagacgggggttctgtgtaaatgcccggcaagagagctgcattccagtttgagacccactgggttggacatagcaggtgaacgctggtcccaacagcttctctcctcgaagggaacagtgcacctcccactgctcgagaccaacctgggaggctcccagggcccctcctgggcctgtctccccccacacagcaggtgccttctcccgggctcctttggggcctacccggtgcctggcaccctcaagatgcctttacatcttgtgttttgggcttggccgcaggaccccgcaggaaggtgcatggccgcttcagcaaggctggcggagagggcagattttctgggcccacaggccttggcaggatgctggcctctcaaggttgcactgacaaccttgggcacgtgacggatttattgaggggagagcaggttgagctgttctgtccaatgccgtcgccaggaggaacctgccgtggcccggcctcaagtcctgttactcaacacttgtcttattatgctgcaaagccagagcagagccgaggtgataacgcgggcacggcaggcccgggctttccaaacctgctcatttttagcccctgggaatcaaagtggtgtccggctctgtcccgcagcctttgatcctccgcccagtgtctccagcgagagagaagcaaagaacacagagagataaaccacacttgagccgtcgctctccgcctggctgcgcctctatctggggccgcagcgtcccccgagtgctgaaaagagttctcctggtgagcggcaccgtgaccttcattcttgaccgcgctgtccggatgagagtggcttgtccagacgagagtggcttgtccagacggaaggggaaaggacggtctgcctgctctcctgaagggaagggccagatagcgagggaacccacctcccttcctgtggggtggaggtttgggggtggaggtggccccaggagacaggggtcacggaattggcgcgaagggaagaatggggagcccaggctgaatgttctccaccagcacatcggtgggggctcaggaggccagtcccattgccaagcgatgaaactcttgtatcttcgaatggcctgggtgggtttccggcagccaagaagcgtgagcagccctgtggaaggaggggaagaggcactggtcttttcctgtttgtcttctgtgggttgaccctcacggaggcactccgctccgggcatgacctcggactcttgaggagcctcagttcggctgtctttctgcagttaattactaggacaagggaacacatccaggtgcctttcacagggacatcgcccatgagggcagggactgcaccctattgaccctatattccaccccagctcctggcacttggccggggctcagacacgtgttgagtgaaaaactgcacatttgggcagagttaccagcaatgaacctgcctctgtagaggatcctaagtcggggcgagggggccctcagtgaagcctacagaaagccaagcagcccaggggttccctctccacctgagaagcagcgagaccctgtccaggtcagcgggaccagcaccgcatcccaggccacccgtgtgtcagcacataacctttgaaaacaccgtgaatgccggctttgatgataatatgtgggtaaaggttgtattgctatctgggtgatgattcatccgtctgtgaaccgggacaaggaggtaataggaaggcgcgatggccaggggcaacgttggaacgcaaacttatcagaggcagtgaactccgcgctgcactaaatagaattccattattgtttcataaatagagagattgaagtacccaggccaggaaccgatgatcagaggggaatgcgtttgagctccgctctgaatagtatttgttctgagtaagtggttgtctcggctaatagtagggtatttcattgttaagagcttgttgagcaggatttatgggtgagtccagcacggctgtttgtgcaggatgctcagtggtcgccaggggtccgggagtcggcagcaatgttgttccatcctttgtcggcttctccatctcctggtgaacgttgccccttggagaggcgatggcgtggcccggccccggcaggtgtctgagggcctgaaggcacccccgtaatcccagcacactcgtgggtgccggcagtgtgtgagtgcgtgcgtgttgtgtgtgcatctgtgaacatatgacaggattcgggtttctggcttctctagaagcctgggctaggccattcccctgcctcactgtggcggctccttactcccccgggggccaggcgttcctgccatgtgcccacctgagccttggcagtcagaaatgatggtacctacctagaacctgcctaccaggtaaacaggcgaaacctagaacctgcctaccaggtaaacaggcgaaacctagaacctgcctaccaggtaaacaggcaaaatcttgtcaggtataaagagcttctcttgggggcagagtctgctggctaggaattgctgtggagtgggggtgtatccaggctggagggcacccccggacttctccccagggagaaaacagattgagcccttctctccatcttctcaccagctgtggtttcagaggcacttccagcagtcctgaccccacctcagggttttctcttccaaaggggctacaggattgaggtagggaggggccccaagagcctctgacttccccccagatcaccaggtaaacccatgggtcagtgtccagcccctctgccccaacatcagcaacacagccctccattccagggcccctgtgtgtccccttcctcctccccccaggaacatccccggagcagcccgcgttagaacaggatcccgacggatcccgtgctgcctccccttcagccagcgccatcctctgtcccccaggcctcgcgggctgggctgcgtttggttgagcattgacaaagtcacctccattctcctccaagaaaagcccacgagagactcagaggcaagtgctcataaagaatcaaacacaaaccaagcccaggtcctgatcacgggcacggccaatgtttttgttcttattttcccttttctctgatcacacgtacaaaccagaaccaaccccacgtgccttaagaaacacagacccaggggagaggggtagaccccacggaagtggccatcggtgtcaggccccgtctcagggacatcttcccccgcctggtcactgcaggcaggctatggcaggttctggggtggttcacccctgcaccctcagccccactgggctttcttcgaggtgctctcctgcctgtgggcccaaactgttatttaaaagccacctctgcctcccagggcacccaggttgtggccagcccgtctgtacattcttggcactgctgaggtgagatgcatgaggtccctgctcacagaacgaggagccaggccattacagctacagggtatccaggaaaggcatcaggtggcgggcaggacagctggcttgcagggtgagcccctcctggcctcactttcccctctttaaatgagggtgcagctcatctgagaataggtaggaaggtgccagtgctgggaggggactgggtggctctctgggctcctcaccgcggctggtccctcgggacttccatgatgggctcacggaggtgcgacttcctcccagatccctcgaggaccccctacagcccaaacctccaggagcaccagcgtgtgggggctgggaagagagtgtccttcaatgcaggtgtgcaggtagccatgcacatgtgcggggtgaacaaaaggccccttcactgtcacctccccgggggccgtaactcaggagccgagcgtcctcctctccctcccaccggtagcagcagacttgaccgccaggctctgaggcctgcacaccacgctcgcccacagtgggctttgtttagtctgggggaagctccgttgacagggtttctgggcgatgggctcttttttcttccgaattcttccagaattctgtaggctgaagacaccacgcgtgcagcctgaggggagagtaaataaccctgtgaagtggggaagttcctgcctctccggagggctgccatgggtcaagctgtgcatggtgagaactggggtaactggggcgtgacacctctgcccccacaagaagcccactgagacaggacctgccctccccaatcagaagagcttgtgcagtggaatgttccagaaggcctgggtggggctgggcaggaggaagagcctcagcaaccgcactcccatcctaagctggggacttgcccgaaaggacagctggagccattttcaagcctcagcctgggcggtcatctgctcagatccactccgagggtctcacttccttacgttccggaaccgtacgggtcatggtggagcgtcctggggaagtggctgtcggcttggttaatgggtccctgctggctgtgaggcacacgaccagtgccctctggagctgccgtccagccccagttcccatctgcagggacccagagtcacattcgcctcctagagaggtgctcagagtcgttatggtccgagaggcagccagggagctgcagaaatggacataaacccgtccattctcctgcaaacacttctccttcctccactctgtgcggaactggggccgggggcagaggtaggaatgggcacagcctggccttccggagcctgtcactcagtggaggaggcgagaggctccaccagccctaacccggggcctcgtgttgctgtttgatgtgcaggagaggagagaggccaagagggagccaggagtggcttccaacagggggacctggcccaaagccaggggaggccgtgggtgcctgtgagggcagggtgggcacatgccagaggttgccatgggggtcgtgtgtggaccaggatgggcagcctggatgcagagaggggctgagtaggaaaggatatggccgggaaggagggctgatttgttttcagaagaatcttttcgtggaactctcgtgtgccattgttaagtgcagatgttcctggacttggaatggggacaagtcccgataaacccactgcgagttgaaaatatcctaagtcaaaaacgcagttcacacaccaaacccaccgagcagcacggcttagcctcacccaccttaacgcgctcagacactcatatcagcctacagctgggcaaactcatctaacacaaagcctatttcagggtaaagtgttggctgtcccacataatttattgaatactgtactgaaagtaaaaaccataatggctgcgtgggccctcagtgtgcggtttccactgaatgcgcgcagatctcagacctcgtggggtgtaggagccctaaggggagcggtcagcccttgtcctctgtccgctttctgcccagtggcccctccaggtcccggcgtctccttggactcacattaccagcatttctgtccatttcgggtgagacccgaagcagcgagaccctatccaggtcaacgtctggtgagaggaatttttttttttttttttttttttgacagaatctcgctctgtcacccaggctggagtgcaatggcgcgatcttggctcgctgcaacctccacctcctgggtttaagcaattctcctaccttagcctcctgagtagctgggacctcaggtgccagccaccacacatggctaatttttgtatctttagtagagacggggttttgccatgttggctaggctggtctcaaactcctgacctcaggtgatccacccacctcagtctccaaaaacggtgggattgcaggtgcgaaccactgcgcccggcctgatgagaggatttttgaggactgagggtggctttatagcaggcaggtagggagctggtggtggcagaagggataagagagggggatgaggctcctggcatcaaaatgaagctggcaccaggccgactcctgcccacaacaccacagtctggagcggcaggaaacaggggacagggagggagtcagggaagggctgcccgatggcaggaagggaccaagagaagaaaaaaagtccagggtcccacattccaggagtaaaaagggaatagaagccccaaagggaggcacagccagactgtatggcaagctccgcaggggccagactgcatggcaagctccacaggggccagactgcatggcaagctccgcaggagccagctctgcaggggccagactgcatggcaagctccgcaggggaaggctctgcagggaacagcacgtcacccaaggtacactaaggaagctgctgagagttctgcagcaccagggcgatggaagttccaagtgtgggccatgcactagagaaggcttctgagagccaaacctctggggcttgggaatacgtgtaagtgacagcatcttccactccttaaatcagtagattcccgtcaggcattgatcagagaccctgagtgtgcaggggacactttcctccgcaaatgcacctcgtgttcgagtcctgcacccctctccttccctgacctactcccatggttctgagcactcagagcctgtctgcctccttgaaggccagaacgcaccagcagaggctcgagcagcctcgctgtcgggaggagggaagcgctgcagggctgggtgcctctgacggccgacaccagcctgggaaatgagcttcgttgctcgatggaggcactgaagctttcactttacttagttttaattaagttacattgaatccccaccccccggcccggagagggcagccccggatgatgcctttgtgtccccacagcacattgtgagtcctcaacaattgtgctagcagcttggttgtgtggttcccaattcatatcagacacccttccagtcttagctaaagagactctcctgcttgttcagtgccaacattctggtggctgaggtctgaggacactgcctggcccttggttcctgggggttggtgaagaaatgggcaaaggaatctcctagaaatgccagttctggagctgtaggagtcgtagaccaaggggccgtagaccaaggggctgtctcatgcttctccaaccacgtttggccaaaaagagcttttgtctttggacttttgctttgctgtaagtcccttccgtagctccgatgagcctggtcccagcagagtgctctggccttcaggctgggtctcctcccgtccagccagggctgtctggatgtgaagggtctgacctacaggatccgtaaatggacttcctggaattttgtcctcggaccagcactaccaccaaaacgcacacagcatttctctcctctccctcaagacactggctcggcccttgttggagatgctgtgctgtggccgtgatgtttccgatcccagtcgtggtggctctgccctggttgaagatgctgtgctgtggccatgatgtttcagatcccagtcgtggtggctctgccctggttgaagatgccgtgctgtggccgtgatgtttcagatcccagtcgtggtggctctgcccttgttgaagatgctatgctgtggccatgatgtttcagatcccagtcgtggtgactctgcccttgttgaagatgctatgctgtggctgtgatgtttcagatcccagttgtggtgactctgcccttgttgaagatgctatgctgtggccgtgatgtttccgatcccagtcgtggtgactctgccctggttgaagatgctatgctgtggctgtgatgtttcagatcccagtcgtggtgactctgcccttgttgaagatgctatgctgtggccgtgatgtttccgatcccagtcgtggtgactctgccctggttgaagatgccgtgctgtggctgtgatgtttcagatcccagtcatggtgactctgcccttgttgaagatgctatgctgtggccgtgatgtttccgatcccagtcgtggtgactctgcccttgttgaagatgctatgctgtggccatgatgtttccgatcccagtcgtggtgactctgccctggttgaagatgctatgctgtggctgtgatgtttcagatcccagtcgtggtgactctgcccttgttgaagatgctatgctgtggccgtgatgtttccaatcccagtcgtggtgactctgccctggttgaagatgccgtgctgtggctgtgatgtttcagatcccagtcatggtgactctgcccttgttgaagatgctatgctgtggccgtgatgtttcagatcccagtcatggtggctctgcccttgttgaagatgctatgctgtggccgtgatgtttccgatcccagtcatggtgactctgcccttgttgaagatgctatgctgtggctgtgatgtttcagatcccagtcgtggtgactctgcccttgttgaagatgctatgctgtggccgtgatgtttcagatcccagtcgtggtgactctgcccttgttgaagatgctatgctgtggcagtgatgtttccgatcccagtcgtggtggctctgcccttgttgaagatgctatgctgtggccatgatgtttccgatcccagtcgtggtgactctgcccttgttgaagatgctatgctgtggccatgatgtttccgatcccagtcgtggtgactctgccctggttgaagatgctatgctgtggctgtgatgtttcagatcccagtcgtggtgactctgcccttgttgaagatgctatgctgtggccgtgatgtttccaatcccagtcgtggtggctctgccctggttgaagatgatgtgctgtggccgtgatgtttccgatcccagtcatggttttccagcctcaggagcacatctcctcctccagcaattcttcgttccctggagcctcggaaccgcggtgcaactggggtgcgtttgtgccagggaaaatggattctgccggtgtctgactctaccaagatccacgcatcattgttagcatttcctttcatttctctttgttattatttgtcttttccaccttgtaccatccccccgaaccccatttatgtgtgtgaagtcagttactctacccattgagcaagagctgagcaaccgtgtatggaaatatcttccttcaaccgcttagatcccagacccagacttttgtccttcagcaccacgaatgaagacttgctatcaccctcgctgtggtgttatctgtttgcttttggcacttatcacctggaaggcagtccccgttttctcgtctccaccaagggagcttgtcaagtgcaaggctgcactccttgaccccaccaaacctgacatgaagtgaggttcaagaaatgtttgggccgggcacagtggctcatacctgtaatcccaacactttgggaggataaagagggcagattgcttgagtccaggagtttgagacccacctgggaaacctagcaagaccctgtctctacaaaaaaattaaaaattagctggatgtgatggcatgtacctgtagtcctagctactcaggaggctgaggttggaggattgcttgagttctggaggtcaaggctgcagtgagctgtgatattgcaccactgccctccagcctgggcaacagagcaagatcccatctcaaaaaaaaaaaaaaaaagaaaaaaaaaaaggaaggaaggaggaaaagaaagcttgccaaacaaatgaataaatgaaaagccaataaatgcatttgtagttggggatatgtgctttagagaaaaggggatgttagatttggtcattttaagtgactcctttattaaacccttggttgtctttgtatttttaaaagaagacgtctcggtgacccagtgctgaggctgacacctctggcggagcccagcttcctttagcaagggctctgtaagacccaactacagactgtgtccagggctcgaaaaacgtccggtgggcaggacaggggatagagaaggtctggccagaaaactggattttgctctgtgtctgttggcttgttactaaccccaagcaaagccactgtcccaagctggcccagacatccagggtgtacccaggcacacaggggcacacaccacacctgagccacattctgtgttttcctgtgtgctccaggcctccagaggagctcccagccattggattctgtggaagtatctcctgacgccccctgtttgaggcccttcccgtggaaatccatctggcgcgtgttggtcaccgggggactgctgacttagctccagcagaatttggagggccttttggctacatgagagtgcagtttgttctgttgatataagtagacggttcattctcattatgctcagctgcagttctcttctatgcagttgccaggaatgctgaattagcaggtcctaaactgttgctcctaggagagatactgtgttaggttcctgcaagcttctggtcacattttcatctactggtcaataaacaaccttattctacatgtggttctgcttagaaaccccttatctaacacaggcgtctccgagatttcccggggttggttccagatcatcacaatgaagtaaatattgcaacaaagccagtgacgcaaatgttttggtctaccataccgtagtatgtgcagtgtgcaatatatggtgcctaaaaacagtgtagatactttaatttacaagtactttgttgccaaaaaaaaggtgacggtggcatgcagtaagcacctgctgttagaagaatggcaccagtagacttgttggattcagggttgccccaaagtatccattgttgccacaaagtatccatttgttaaaaaaaaaatgcaatattgcaaagcacagtaaagagaagctcaatgaaatgaggtgtgcctggatacattgtcgagccatcctcactgtaactcagcctgaaccaagctgccctaagacatgtaattctacatcaggcaccttgcagcctctctgtgcctgggaactgcagacaacactttagcactgtgcgtggggccattttaaacagtgaaatcggccacaaaaaaaccaaacgtggaaaacatggcactaagtagactagaaagaacacctggtcacagtgcgagagctgagacaagagggtggagaagaccccagctgggagcacacatgccagacaacccgggtccttcacccctcggtgcaagtccaggaatggccttgggtgcacttcatgtattgatttgggggtcacaaagacatcttagcaagtaggcaaattcaggaatataaaatctgggtataatgaggctcaactgtataaataaaaacctatataatatatatcagttttattgatatatacacttatatatatcagctttataatacatatatgtcagttttactgagacgtaattcacataccatataattttccctttggaagtgttagtttttggtcacagagtggcacaccacaccactgtctaatcttagagcatttccatccccccagaaagaaacctctgaccattagcagcccctcccagtttctcctctccccccagcccctggtaatcatgaatgtcctctctgtctctgtggatttgcctcttccagacatttcctgtaagtgggactatacaatgtgccatcctcaggacctggcttctctgctcagcatagggtttctgaggttttgccacggtgaacacgcgtcagtctcccactcctttttatggcccaataatattccattgcatgaaacccacattttctgtctgcgtccaaatgtccactaatggacatttggttgcctttcgccgttgggaagagtgccgtggtgaccgtcccaagacaagtgtttgtgtcgagagacatcttcattactcttggccgtattcttaggaatggcattaccaggtcatccaatggctttgtttaactttttgaggaactgtcagactgttctccatggcggctgcaccggttcacattcccaccagtagtgtgagggtcctaacttccccacatccttgcagacgcccgcctgtctttcggaccgcagccatcctgtggggtgcggtgcatctcactgggactctgtgccttctgagggatgtgctggggagcgcaggaggccgtgggctctttaatccttggggacagtgacatgagaccccagccaagccctggtgtgcatgctggggagtgcaggaggctgtgggctctttaatccttggggacagtgacacaggaccccagccaagccctggtgtgccttctgagggatgtgctggggagcgcaggaggccatgggctctttaatccttggggacagtgacatgggaccccagccaagccctggtgtgcatgctggggagtgcaggaggctgtgggctctttaatccttggggacagtgacacaggaccccagccaagccctggtgtgccttctgagggatgtgctggggagcgcaggaggccgtgggctctttaatccttgggaacagtgacacgggaccccagccaagccctggtgtgccttctgagggatgtgctggggagcgcaggaggctgtgggctctttaatccttggggacagtgacacaggaccccagccaagccctgcagtcctggttggtcatatctgtgtgagcaacgctgcctctgagagagtggggagaatagaaggcaatcttccagtcagctttcccttaacaagtgatctctattcgctgaaaccacatttgcagcctcagacaaatgcctgccccgttttatacgaacaatgaaagcctgcattgcatccttggcgtcacggagctactgccctcagctgcctgtccacacgaggagcacagcctggagcacattgcgttgttggtgtcacggagccactggcctcaactgcatgtccacacgaggagcacggcctggagtgcattgctttatgtccccacataggttttttgtgtgcattgatgacagcgcaaataagggagggcagtgtcggtgtctctgtgagcacgtctgatggctcccaacagacactcgctgtccccttcgctccctgcaggggccaatgctctggaattctctagatacagcaggaggtggtctcaggacaccgtgccgcccctgtggcctcctcctcctcagccctagcaccacagttgtggaggagcccaaggaggtggcctcccaggtggaccctattccttcatagcctgccctccgctgccacccaggactgggggcccatgtccctggtgcccggcgtctgtgtccccagctgaagctggacagtgctctgccctcctgtgcacttctgaccaatcgagtgaactgtgttgagaaacggatgatgggtggttgagaaacacacatgtgcagtgctcccagccggaaagcctgtgtagtgctccaggccggaaagcctacaggtgccagcaggggaagctggcacctgccctccaagcagcagtgaaatgatgtggtccttttgttcaagaacatttccatgaagatttacaaaggacctgtcccagaagaggttcccacagacactgaaataacaaaatgtcagccgcatctccgcaggcccccgggaaccacacgtgcagagtccggcacatgcagggacctgatgggacggggacctgcagttgccccgcagcccctgcccgtgcagggggcccaggtgcccaggccccgcctcgctgtgctgcctccagctggtgtttattttcagacacctagggcccgatccatggttactgcccagctccatgttaggtgtaagcggatgctcctttggtgaccatttcccatctgtttgcccactcgtccacagcctcccacatgcaggtaatgatgttggctgaaacttgttattcgaatggaagttgatcagttgataaaatccttcgtggagtcaacatagctgaatgcttcagctgtcaaaggccccctggcagggcagaaagcgccccgtggaaaacggtggggaattgtggagcaggcaggactgccaggcccagctccgcgacttttgcaagtttgggatccacatcacatgcatgcctcatctccacagactgctggcagcttcgcctatcagaacaggactgagatccaggatgcgagaagggaacccttccgggtgatgcccgtgctgcttttctgcccatttatttgctgattcactcattgacttaacactttgccactagccacctatgccaggcactggcctgggccccagtgacactctctgcatcctcctcaaggtcacgtgctgggtacagtcccaagctcgaggcatccttggcacagcactccatctctgctgggatgagacagcctttctcagagaccacttccctccaggttgtgaacggttctaaccattcagctctctgatctctgcagctccagcacatcacaagcaagggggaagtactcactgggggagttagccaagggccatcagggccacatgtcctgacagcaaagagatgggacctgccacacaagccagctccaaagaccgctgggccatctgcagtgggcagttcagtgctggggacatcacagcatcactgcacataatcagtgataatgacacccacattgcaggtatttctcttatttaaggaggccaagacacagggtgcacatgttagaaattttccatataaaaaagcaaggggctgaaaggagtgcacccctctcaacaggaagacttgatcgtctggaagaactcaggtgctgacaggttctggaaggacgaacttcatttacacctggacacagccacgtggacacagacagacttttgtcttatagatggaagttgtccctcaaaatctactacctcgtagcttctcctgcagacagatttgggccatttaggagaaattttaagtattccagaaaaatagaaaccctgaaaaatgtttgcattgtgcaataattgcattttaaaaacagctttattgagatgtgattcacacgcaaacaatgcaccccattaaaacgtacaattcagtggttttcagccacagacttgtgcaaccatcacaataaattttagtacatttttatcactgaaaaaagaaaccacacacctattagtactcactccgcactctccccatgtccccctgcccccagccactgcaaccaccaacccactttctgtctctgtggatttgcctagtctggaaattcaaatgaatggattcagacagcccatgaccttttgtgactggctccttccactcagtcccgtggttcccaggttcgcccactttgtggcctgtgccgctacctcactcgttcttatggctgagtaatattgtgtcgtatggaggggccacattgtgcttatccatccatccactgatgggcatttgggctgtttctgctttttgatgttatgaatcatgctgctatgaatgtgtattttcaagcttttgtgaagacgtaagtttctatttctcttggggacttccttgaaaatggaactgctgggtcatgggactcctgctttccatttcgaggaactgctggactattttccatagtggctgcaccatgtcacctccccaccagcagtgtctggcaggtccccatttctccacatcatcaccgacgcttggcatggtcctagctgtgttttggtctccttcgcctgcctgtgtttgtgatgaatgcttgatccttcatacgtgtcatcttccggtttcagataaatctgggtgtcctcttagatgtttcagtttcaataataatgagggagaaaattcaaaattaaacaaccaaagaacattgtaaattttcgttcctgtccccagacacctcccagcaggcttcagggatgagaggttggtcagggtgcaggtgactaacgttctcagtcatggaagagcgcacagtgtgcaaggctgaacgtggcctgcttccacgatatttgtgtctacaagttggcatttgcaatgcagtcatatttttcagggctccatgagcttaccccttaaagctcaaggattttacagccatctctccctgtgtccctgtttctgcagggatcctggtagtagccctccttgatctgagcctcgcttcccagctgactccatcctccacttataatcttgctggagaacataccaaggccacgtacattcacagcaagagcggctcagcctgtgagagttggtaaaggaaaggggtccctgccgcgtggcccccaagactgcctttgccaggtgtgttctcacagagctgtgtttcaaaggcagcatgctgtcacctggggacaggtgtttttttagtcccacggtagacaccttataaaggcccaagggctcctgagcactgggaacactgtctttggtgggcactgctcagctttggatcatggtcctggctctgtagtctgactgggtgaccctttccaaggacggggcagtgatgaaacctctctcaaggggaaatcagacaccagtgtctggcatgtgacctccccgtgatgctggcagcatcctccctcctccaacccagtgctgccccgctggagactccacgccacagcgtcaggccgtgcgggggcgacccactgtcctggattgccagggctgccgagggggctcttcttgttgccactgaaagcaccacatcccagaaagaatcttggtcccctgcaaaccgggatggtcaccgggtcacctacagacttggcagcacccacagtccaggcccctctgatggccttgggttcctcctgctccttcccctaggaggtcaggaacgtggggcatggagcatctcggggagtcagctgggggagggattcttcccgtccggttgaggaggccatttcggtgatgccagtgatggccactcatcttctcaggcttgcgaatgcgtttcctcgtgcctggtttgcttagacagtggtgcgcctccggcttgcaagcctccagcctgagggcagctctgccatgtcttcttgctactctgagaaagaagcaaacactgggttctgggtttcgcccagtgaggggacagctccagttctggggtccagacggctgctttgccttccagtgttgtgggctgcgtgactttggcagcttagtgcctcagtttcctctcccaacgtggtcatgatagtggtccccgggtaatgcaatgtaatgtaattcgccatgatggtgcccggctatcggggccctggtgcgtgccggtgagagatgtgtgggtgccctgcctctgggatctggagtccgccaggcccggtgaacccgacattccctatgagcttaatttttccctggctcctccttgggaaaggatgagcagccctagcccctggtatcccccagttcctgtccctgtggacccagctcctcactcattccatcccaggtttccgacccaaggatggatagaaactgagggcaccggaccttctgccctccctcccttgtccctcctctgttcctagtttctgttctgagggggctctgcttcccgtcctgcaggcagggctcccagggtgcacctcctctgggcacagcagcccctggctttctgggaacactaatggtggaggggtcatggggaaagaaacctgattccgtcgtcaggcgatattccctggtgcactgaggagaaattcttcccgggatgcgagacctgagcctgtccttccctcctgctcccggtcaggccatggggcctgaacacactgctccatatgtggggagcatttccaaggcttcatagagttctcagcccagacaagcacatgccagctctgtggcactggacaatgctcctaacctctctgtgctcatttctcatctgtaaaacaccagagagatggaatgaggaggctgctacagggctggccaagtgcttgacctggagaaggtgctggagcggggtaagctgagctgtccttgtcctggttgttttcatattctgacacttcccgcatccctgcaggaccagctcaccttgggaaaggggccgagacttgaacacatgactgtgactccagaggccagggctgccctgggctaggagcagagggctacagccactgtcagagggaggacctgagaaagggaagggtgggggccagggaggggacccagggaggaggagcgtggcccccttgagggagtccttgagggaatcaaccacggattctctgaaaagccccagagcagcctctccccatggccagctccaggttcacacaggggccaggcacacccgccccatgcgagcctgacccacagtgagaggccgcttggtgccgagccttacccagtgggcatgccttcctgggtgcagcacagacactttattgtaatctttttccccagtagaatccaaattttaaaacaaaaagtcaacatgtggccacatacacacatccctgtcaggttgagacaggccacgcccttcctacctccacctcctcacctgtacgatgggtatcatggtggcagccacctccacagcggctgcagctgttaatggagatgacacctgcccggcacactctggggcccaaaggccggatgcctgcagtgtgcacacacctttcccctccctcagccttgggagtcgagtgccccccacccatcttcctaaagcgacccggtcaccgcccctgaagcgccctccctctgctgagcccggtgaccctgagccgtctttcaacggaaaccgtagtccctgtgcctcctctgagctctggccctgtttctggcatcacaacccacaggggccctcggagctgctgaggggtctcagccaagctccacttggggaggttgggctccccagggacacagcatccgtgcctggggagagaatgtttgaccgagccgggttacttggtccccaagtccctccacctgccaaaccagcaagcacgtctcaaccagggcctcctctggcctccacgctacctctccaggccttcctcctctgccaactcttcatttggcctcagatgacatggccctggcgtggagtgtccctgtgtaggaatatgtgtttgcatgtatgggtgtgtatgtgcatgcatgtctgtgtgtgtgtatgtgtatgtgcatgtgtgtgctggtgtggattgtgcatatgtgtgcacatataagtgtgtgtgcatgtgtgggcatgcgtgtgtgtgagacatgtgggcatgtgtgggcacgtgtgcatgcatgtgagtgtgcgtgtgtgtctgtgagacgtgtgggtgtgtgtaggcatgtgtgtgcgtgtgtgcgtgcgtatgtgtgtgtgtgtgtgagcgccagcatggttggtggtggtggcaggatgcagggagtcctcagctgaacccggccccaggacttcccagcttcaggggtgcctgttgcctgtgagagcagtgaggtggggaagggttaacccgccgagggctgatggcccaagctctgtcctgagacggagccgtcgcttcccactaatagaaaccagagctctcctgcagtggccgcggcgctgccgccactccgaggccgggtctttgttgttgttcccggtgggcctcggctcactcttttgccttctttcacttttggaaacaaccaggacgagccaaggccagagttggggagaggttcttgggtgggatcttatttcttcccaaagtgcctggaaacctgcccgtgcattggtgcccgctctgtcctgtgccctctgctccgaggcaccaatctggccccgccatgaagcccagacccagcaggcaaatctcagggtagcctggagctgcagtaggagaaagagaagaaatgatgaagaatccccacaggcccaaaaccagccagcgtggtacgactttgccatcatttaatccttggcctgacctaatcaacagggaaaccgaggcacagagaggctcaggagctcacccaagtgacacagccagaaaaggcgagagctgggtgagcccagttctgcccgaccccgaaggcacccccaaagctgatttcacacccaggagagtgatctggggtccatctgcctccttccccaaggaagcttgggttcgacatctttctcagaaggccccagatctgagacagccctgcctcccagatagacccagaaggccagatgctcagcccaccccaccctgggtccagaggggctgcaaagctgccagtgcctcacagtcgctctacagctttgcaggtcagctcccggggcccccgtccagagttccagaccagcagcatccagccaggtgctcagggagccccaagaaagctgcttgagaaggctctggagtgtccagcccaggagtgcggctcatgggcagactgtagggttcacatcgcagcccggctgctcccccatgcgacaccctgctctctgatcctgactcccccaccttcccacgtgtgaaatgggatgtgctgctgggtttaaatgagatctgactccaaagcacagagctcggcctggcccatctcgggccctcagtggacatccatggcgccgtcagcatcctcgccccactgggttattcccacgctcatcctctgaggaggagcagcccagcactcagcggcctgcaggctggcggggttggtagcagcagcctctcactgggccggtgacatgaggatcactgggacaggcacgggtgtggtgggaccacagggccccgagggcagcaggcagcccccagcctcctccgaggtctgtcctggaggctggccgcccacccgccggctgcacctcacagccgctcctccccagcctgctggtgtctgacgttggcatcccctctgtgggatacatcaggagcccatccggatccggggccggcaggtggggttcccgggatgggttgggagttcccagaagtccggtgaggggctttcggaaagggaccgtgcaccctcctgtgcagaacccggcctcggccaagctgcaggctctgacgctggaattgaaacttacacaaatactccgccgcttttcaggcatgttccaaggagacatttatgttggctgaggcggtattttccttttattgctgttatgagattcaacattttttccagaaataacttctgaaaagtgtgcctagattttgaacacttgtgatcctaacatgtggtgagaaaggcttttcaaaacacacacgtgtggacagaggtccacacacggatacgtgtgcacacacgggtgccttgggcgtgcgtcttccaaaaggggcgagtacagctatcaacttgtgacttccaggaggcctgggtttgcctacgaaggggccgtgttcccagttggcgttcacacgtggtgtacacacacaggcacaggcaccgtgtcccaaggccatctcccaagggcacccgcagacactgggcagccttctccgaagctgtcagtgtccttcctcgtgagaggatgatgaagaggatgtggtttccgccgcctcatccacaggccggctgcccacggagccttagacatcgaggccagagcgactgttggaaaggaatgtgaccgcgctgtctatgaaatgccgcggagctggagccccactcgccgtcacgatgagtcagcgccgagcggtgagtcagaaggggagagctgagctcccagaccggagggcggcacttaccagaagcctgtgtgctgaccggcctggtctcctttgacgtctcgagcagcttggcagggtgggaaaagtagcctgagagtgatccccgggcagtgtccgaggctctgccgtccccacccccacaggcatccaggggagagaaacaacctggaaagaggaattcagatgtgaatggaaacttgtatccaaaatttgaaatagtccctttgggcctgctcaagagtccttccctcccagcccctcacctgcgcctgcgaggccgtgcggaccccgctccactcaccccgcctgggggccagaaccacctcccaggggcttccgccagtgccgcagttgctgaccccaggcaaacctcgccgcctcctgccccggcgggcctgggatttgcgaatgtgtgaaggcattagctgccagttgtaactggaacgcagcctagaggcctcactcctccagcaggaagccttgtagtgcagcgaatctggacccggcccagcgtccagagacaggaagcattaataggagcgaatgtgaacactgttcgcgccctggctgcgatttattgccgattgtggggaaaacatcagttggttgcagagtttcattcatctgaatatgaaatgtaattagggagtcacccagtgtcagaccccaaggaataaggtccaggcatgggaccctcgcccccgaatgccgtccttccccaccgggggggggggcgggaacataaaatggacccaagtcactgtcccttaaggagcggaccgcctgagccctggagtggcccagggagtcctgagtgcagggtttccaggaccgtgacaaggttctcccacgtggtgggggaggaccgacctttagggacaggaccggtgtgtctgggtggcagtttagagagctgggacagtctgcatcactctgggtggctcctctcaaccctggtgtgccctagactgtttctgaaatcggtcctggaaaggagagggagagagagatggtgtctctgtaccgaatcggaaggatttgtttttgtgtagctaatgaggtagcaaagacagtctgcaggtcagaggaaggccacgatgaggatggggacaaggagagctcctgaaaccctcccaccttacaaagtcccccagcctccccacatagttatcctgctccatccaggagcaaacttcatctgccaaatgtgtgtgagcgttctctctctctctcctctctctccccccctccctccttctctgtgtcaatgaaggaaggctgggggtttttgtgtgttgttgttgtttcccctaatcgccttcgcccccgtagccagtttgttctcagaaaagttcctccccctcctcctcatctcctgagctctttgatcttctagttcgggttcagttgcttcgttttttgcaattaccagcctggagggaggatgcccctgacccgcagtctggcagacagatgggacaggaaacggggagtttatttcagccttcgccctattcatcttggatagattacaacagtagcagctccaaatgtcttcatagcccatttatgataaagtgatggtaacatcacacaggaagagaaatgtgcggattagccatatccggggaaagatggatcgactgagagcatggcatcgctctgaacaaagccccaccctccctccccagcccctgggaaagccccgctcctcgaaggccagtgggacccagaaacccaactgggagagcagcgagacacttgctaccgcctctctctctttctcctcctttctcccccgcttcactccgtgtctccccctgcttccctcccaccctccctctccctctccctctccctacattctttgcctttccaagtttttgaacgtctacagcgcaactccacagcagcccaaataaatcaagctgccatggttactttgcagaaggctgggggatttatatttgaatttcaggaagaggggcaaatccatcaccctggaatgccgcatctatagattttaaagtttgcctgaattattattgggaggggtgggggctggcagtgaaaggagagtttggaatcaaaccaaggagggccgggtaggaagagcttcttgctgaaggacatgggcacatttataagccatcaataagaaccattaagacctgcggctttctctttgttctttctgagaggaaacacttgacaagttgttgttctttgttgtacttttttaatgagccaagagaacatggcacagcctggagaggaggggcctgagcgcttttgtcttttacatttttcatctttttactttacatgaaaactgacaagaaacccctccatgaaggaaagccgatctacccaggctggtttcaaagagctccaatttagagcatccccggcgacttcatttctaatcatgtttttactttgctggccaccaatcggagactcccacaggtcactctggtttgtattgattagagccgggctccgaggtgaggggcccgggatgaatgaggtgggggtggcaaagagatgcgttgcccgagtggcggtggccctgcctgcggaaggtatctcaggatttgaatgacatctcaggggacagtatcaggcttccaaattcctttcatccatcagatgagagaacaagctgtggctttcagttggacaggggctgggcctttctcccggagtaaatgggctcaggccacacagataaagagcttctcctgttcctttttaaacgtttcaggcaggaatcgtctgtcactgactgagggcgggtgggggcgggagggacctttcagctctgattaaagtggcaagtccagggccacagcggagctctggaaagtcttccccatccttctctcccgagtcacttaccaggtttacctacactgtgggggtaggggtgggggtgggggtgggggtggggttgccttgccttctggaggaaacctgccttttcatttcttaaggcaggatctcgtctagcctgcaaaagctacgggacccccggtctcagttgcacacccatccagcttccagggaagaatgggcacttatgaagtgccaatggtatacactaagtactgggagggattcaggacagggaggacctgggaagagaacctgagtggaaaacatagccgagaagacaggacctgtgtagccaagaatcagtggcacagagtaaccaggaaacattgatacagggtagacaggaaacagcgacacagtggagccaggaaacagtgacacagggtaggcagaaaacagtgacacagtgacacagggtagacaggaaacagtgacacagggtagacaggaaacagtgacatagtggagccaggaaacagtgacacggtgtaggcaggaaacagtgactgcagtgacacagggtagacaggaaacattgacatggtgtaaccaggaaacagtgacacagggtagacaggaaacagtgacacaaaataggcaggaaacagtgacacagtggagccaggaagtaatgatacaatgtagccaggaagccgatcagagtgtagctaagaagcattgacaggaggtcgccagaaaacattgacacagtatagccaggtttcagtgtcacagggtggccaggaagcagtgacatggggtagccaggaagcagtatcagggtaagcaagaagcagggactcagtgtagccagaaaacattgacacagtgtagccaagaagcaatgacatacgtaatgacagcgccctacgtggtctcgaggttgtccacagacgcgcccatcatctgctgtggttggacagtgtgaccagtgtgaggatgatttctttcttgccgcttggtacgagggatgtttgcatctttgctgtctgctcctatgacctaaacaagggaccttggagaccttactgtctcttacctgggagaagtgacagggaggagatgagggcaaggacattcccagctgggccctcaccgaggctgcagcgagccccagctgacaaggacggactaacgagtatgccttctgtccagcagccgctgcacgatgctggcttcctcactaagcaggagtgcgggcgtgccgtcagggtcctggtgtccggcatgaggccgtcggaagtctccaggtctggggatctttgggtttctagcagcgccctccttccatccagaccccactccctctcagtgcctgacttctgaaagcaaagccatcacgtgggccggatccctcctgcctcttggctccgcccgggcctctgagcggccctggcctccagacacaaccgctcctgggaagccgtctgagggcagccattgggcgtgcgtgggtgccccagcccggagcctgcccatgagtgtcccctcctcctccggacaccaccagcgccgtgaggatgcacatttcttataggattactcccttttaatagagacccagaaaagtttccaaaggcaaaatgacaggctggttaacttcatatcccaactccaaaaagatacattttcctctttgtaatgcactagttagtggttactggcacattacattaactaatttgagatcgaattatcaaatttgctcattgctgctagcgctaatttgaaacctcacaataaagaagggtttgagaggcacatgaaaggaagccacccacggcggctccgaggcctgtccccggagcatcacagcgagcctcgcaaagggttcggggtaattgcagtcatgagccggagttgattgaagaaaattataccccagttttttactgcaagtttttttttgtgtggctttccttaaattgtgtggtgaaattcaatgacaagggaagacacgtataggacttttaataactgtattaagaaggtcttccgagctcctttctgctgtgtcccatcgggttcttaacctacagctccctccaacttgtgacgattcttgaggagtttgggtggtgttggttgtttttcttttttaagaaaattgtgatctggttcaaattcgcttttttccatgtcatttctgttgttattcttattcttctacaatttaaaccagaaaatgtgggaaaggaagcctcaacacatcctatcatctgttgattgattatcaattgattatttttctaccatctattgattgttgattatctatcaattgattatccatctatcaattagctatctattgatcatctatcagtcgattgatcatctatcactcatctgtctatgtatctatcaattatctatctgtctaatttattttccaacatgagacactgctgtgtccttgtcagacaaaccctcatgacctttgaactttccctaaggtagcaaatctcagcaaccacatttccaaattgcaagtcacagaaatgaacttatccccccagcatcatctggatgactaaggcatgccaaaaaggagggcttttccccctgcctattgaaagatttgtaacaataaaaagtaataaaaacgccaaaggagttgagcttgctgccaggactctccccactttcctaggaaaagcgcaactgtgagtgtaaaataaaggcccctgagctctgtaattaattcatttacatttttaatgctgcaaatggctacaaacatggcgtgacatttagagtgacatccagaaactccagcccagtgagtcctgctcagactgtctgtgcaggggttgttgctgagtcaggaggagaattttttttcagaacccagggagcaaaaacacttttcagaggtcgtctggcatgagtggggactgctgaggctggaggtccagccagctccaaagggtacagcccagggctccctgctgcccggcagggatggggagctaggagagggctttgatgtgagggatcattgggtctaaagtatgggatcctcctctcccttctgaaggtcaagggagagattaggagctggcaccaaggctcaacattggaagggcaaaaaggtcactgttttattctgacgtccttgggtatttattccaaaatgtttggccttctccaccatgagcgggtcagtgtttggggcaggggggcagatatgcagggtgatggggaacatgccttgcctcctggtccggtagagctgagagagaagcctgaggccatcagaccaggctgggggccaggggattgagaggggagaggccctcccaggctgaggctgtggatcaatatctcaccagtggcccctggcttcagggatggaaggagagcgtggaggcgtcaggcgctcctctctcctctaatctacccctttgctggctgcttggggaaatcgaagcctaggggtccactaacttccccagaaggctcagcccaggtctgctggcctccaatctggggctctttcctctgtgccacccagccacccacacagccctggaagccattgttcaccagcaggtaggcgctcctcccatggctttagccggcttccccaaagagttttggtgccttttctgcccatacttgcaggtagttagacaagccaggaccagccatgttgggcaaattggccttccagcctctggggctcacagctgtgtcccagggacgactattgtcatagtcagccagccattggctacacatggtgggtgactctgaagagagcattccctagaaaacagtgcctgggcctggtggccacacctaccaggtgtggcctcttgaagagacttacttccttgttcctggatatagaaccgggcagggtgtacacctacgcctgccctctactgtttgttagctgtattgcagcaccgaaataagaacacacatgtgccaaattataagacacacacagtgggctgtgacaggaaaagagactgatgtctgtgaaggaccaaaccctacaggttcctaggaatttcactgtgacgcattgggattttcatggtccaactcaagagtagatgtgtgtgtgtgtgcgtgtgtgtgtatgcacacgtgcacacactggtgtgaacatgcaggtgtatgtgagtgagaatgtggggcttggtctctgcaaaggctgtgtgcccagggttgcctcccaggtgcagtcacaggcagcaggtggggtgaagggcctgtgtgctggctgcctcccgggttcttggagaacagatcatttcccaggtgacccaggtcactgttattatcgtctcagggcacaaagtctgcatctgtcccccggacacagagaggggcagagaggaggaatcaacaatgtggacctgcctatttaaggaaaactctcacgctgttggaaagcccagtgccttcctgctgaacccacccccttggccccgcacaaaggtcctcctgagataaggccaagttctttgatctccatcgatctccaggcagaggtgactcagaggccctgctcacacagcccagctgctgctgtggcaggaagagcttctgagctacacctgctcagctggggctccagccaagtcctctgagaggagcctggctagctcaggtcctggggaggatggtggttttgagggagggggctggcacgccctccctgcccacttgatccagcccccagccaggcacatggctgtcccaagcacccgagggagacgaaacgcgtgcccttcctcatggagcctgactcgtgtcctctgcgagggatagagcctggacactgtggtttgccctcatcacttaccatgggagctgcgtgggtgtgatttgtgcaagaccaggggactttcacaaaggaagaggaacagagggatcggagaagttgggagaggggaatctgaggtgtgtgtggaagctccctcagagataacttaaccccgggtgggctgatgggggagcatgtgtgcacacacgcgtgggggtaaatatgcatgtgaatatttatgtgtatgtgagtgtggcagtacacatatgtgagtgtgtccatttgtgtgtgggtccgtgtgtgtgtgtacatttgtgtgtgggtctgtgtgtgactatgtgcatttgtgtgtgggtctctgtgagtgtgtgcatttgtgagtgtatgcatttgtgtgtgggtgcacatgtgtttgtgtttgtggggggcacatgtgtgaagggtacatatgtgtgtttgtgggcatgcatgagcctgtatatttgtgtgggggtgcatgtgtgtgtgtatgtacgtttgtgtgtgagtgcaaatgtgtgtgagagtgtttggaggtcacgtttctggggggttgcacatgtatgtgaggccacacatatgtgtatgtatgtgtgattgtgatgtgcccaatgtgtgggtgcacgtgtgtgtgtgggtgcacgtgtgtgtgctttgtgtgggtgtacatgtgtatgtgtgacgtacatgtgtgcggtgtgcacaatgtgtgtttgtgtatgtgtgcacgtgtgtgctgtgcaagtgtgcgtgcgtgtgtgtaggtgcacatgtgtacatgtgtgcatttgtgtgtgggtccgtgtgtgagtgtgtgcatttgtgtgtgggtgcatatatgtgtttgtgtttgtaggagcacgtgtgtaaagggcacacatatgcgtgtatgtttggcatgcatgtatgtacatgagactgtatatttgtgtgggggtgcatgtgtgtgtgagtgcgtacgtttgtgtgtgagtgcagatgtgtgtgagagtgtttggaggtcgtgtgtgtgtggggagtgcacgtgtgtgaggctgcacatatgtgtgcggctctgtgtgattgtgatatgcacaatgtgtgggtgaacatgtttgtgtgtgagtgcactgtgtgtgtgtgctgtgcacactgtgtgtgtgagagtgggtgtgcacgtgtgtgtgtgagcatgtgcacgtgtgtgtgtgggtggcagtggttttctgtcaaagccgagtgtatagcagtggcctgggagctcagagcgaggggaaacaggcccggaataaacgggctgttgattgactcgagttacatcattttcttcccctccggagcctataaatctcacgctccttgtaaaaacagaatttaaaaacaattgagcctcctgggcccctcagttccagctccagctcctgggcctcgggaatgaaccagtgagtgcaccccggctggggctctcactctccctaagacccaggacccccacccacccccactctgaggccagtggcggagaggccaccactgtctcaggagcttcgtccctgcacgtccggtctcctcccagacctgcggcacccagtgtggtgtaggccagtgcctggcagcctccagtccacaggccatgctggggtccttagagctgcttctcccccagatggccaccctttaacgaggcgcagcgacccgtcacctagaaatccacatcctttgctccctgcccatcactgtgcctctgccaccagcacctcctcagtgctcaggacgcaccaccctgttcgtgccccaggatggggacagggagggcagtggtgtcttcttttcagcaggggttcatggccttcttacctttctaccttctggatgtggttcagtggactggggctccctgtgatccggcctcttctaatcacgctctggtcactctctaggccccagtgcccagcaggtcgatgtgggtccctttggtcctgggcagccaccggctctctggcccgtgcttctgcgacacccgagcacagagcagcccgtttcatgttgcctttgtgcctgtcgctagtgtactgtgtgcacttggtgcgggaagccatacgctattgtcaccttttcaaacggggtttcaaaagggtctcaggacttagcccttgggaatggcaggatccaccccacccgtaccctcaggtctcaccggtacaggtgggggcagccacgaggtggggcaggacacagcgttgccatcaccaagacgacggtgagagtccgacctcctgggcttggaacagcttggacaaacaccagagcactcagcctgcaccacgtggggcgggcggcatttgcagtctcacctccgcagtgtgtgccgccagaagcgatgagcggaagctgttccaggcgccaacagaagctgcctggcccctgcctcaggaaagcgtcttcctcccacagcaggcgtggacggctctcctggaaagcccagggaggccggggagacagcggagggaggaggaagtccgtgaggatcaggggccccgccagctgccgccagtgcctgctgggtcccaggccagggaacccccagctcccgcctggaaacccacgtgtgcagtcataaaaagcaccgacaaaggcgagggccggtgctgggagcggccgcacttccccgcaggcctggcttcctttaatcctgagcagtaaaagctgcaaggtctcacatcccagaacctcataacaaagagggcttttccccgagtatttacaactcctggccgtggcctgtgacaatgtgacggcttatgtaatgatgtcaaagaggcctgttcagcttagagaccccccaggggctcccccggctctgcacgggcctcatctccttactccaccaacattgcgggcagcggacggggctggtgaaggggttgctgctgaggcaccaggagaagcttcaactttgggaaaaggaaagaaagagcttgcaggggtgggggctgccaccctccctccgtctgggttgggaggaggatctaccagcagcagggccagcccctcctggacactcctgccagccagaggagagagtcctggtgtagccttgatgccgccaagagggagcatggggcctccaggggtctccgtctctccctccgtctctccccagccactctacaaagtgggtgcggagcaggactcccacagtggggcctggggcactaggagccccaaggagggggctccgcctgcagggtcgcccccagcctgccgggctcactctcctcctctctgaggccacctttgccaccctgccccgcctgccagtcctggccatcttgacaggccctcaaaagacttcctaaaccctatagccactcccagacaatctctccacactccccgcgatgctcctggctgggctcagggtcctcggacacagacctggcagctcactcgctcatgccctcattcctggccaaaagactgtacctgacatgaagcctcattcacagggacggaagccagcaggttcccctgtgacaacatccgaacagccgagcgacctggcaccctccctggatgctggcctctgaactggatgcatggcccccacccaagcactgaggccctggcatgatcctgcgggcacaggcaggctccgactccatggggtcaggatctaaagcacagatgtcccccctgattccgtcgtcacccccccttgattccgtcatcacccccctacctgcccagccttggttctcaaactcggcgagtgagcagatcagctgtgggactcggcgggtcgtgggcagcacatctgaccctcccttgtgctgatgtgacacagaaccctgccctgggccagagtccctgagggtccaggccagcggacgcccctggtggtgctggagaaaatactgatgtcctggggggaggatgcacgcgaggggctgagcagagctctggtcacctggtagcgcacagtttctggcccctacatgtggcctctgaactccgccaaccacctctcccccagcccagagctggctcagcctcttccaggccccactgcctctttaattactgaaaatgcgtcctttggaggggtgacccccaaacccccaggtccttctgagggacacagggagtgtccccaaggaaatctctcatgcctgtgagctgcagcccctcttctaatgagcagcctgccagggaggagtgacttgggtaagctgctcagctggggtaggtggccgggctcccaggaggtgttagccggccccagggtacgcacagctgcagagagccagctcaggcctgagcatcagctctctctgggagatgaacgcaggggatgcccttcctgggaatggaccgagtccttgtggcagaggctgagggctggccatgcccccagagtagaggcacacacaagtcccactagatggtcccacctgaagccctgaccaccggccagatgggtgtcccagcaggggtgccctgggcggctctcagggactgtgtttatttcctggagctgctgtaacaaagtaccagaaactaggtggcttcaaaccacacactgtgtgctctcacagttctacagacccgaagcctgagatccaggggaggtcagggttggctccttctgaggctctgagggagactctgtccccagcctctccaggtctggtgttgctggccatccttggccctccttggacttccttggcgattctcagtgatcctctaccatccttggcgatccttggccatccttggtcctctttggccatctttgatgatccttggccctccttggccttccttagcggttctcagtgagccatgaccattcttggccatccttggccctcttggccctccttggccctcctcggccctcttggccctccttggccatcctcgacgatccttggtcctccttggccatcctcgaccatccttggccccccttggccatcctcgaccatccttggccctccttggccatcctcggccctcttggccccccttggccatcctcgaccatccttggccccccttggccatcctcgaccatccttggccctcgttggccatcctcgaccatccttggccctcgttggccatcctcgaccatccttggccctccttggccatcctcgaccatccttggccctccttggccattcttggcttctagacacatcacctccatccccgcctctgtcttcacatgagcacttccctgtgtgtcttcttataaagacaccctacttccttgttcagagcccatcctgattccatgtgaccttatgtcaattaatttgcatctgcaaagatgctttttccagaaaagatcaccttttaggttctgtgagggcatgaattttaggaggagcatgattcagcttgctgcaggggccatggtcagccctaggaagggcttgtgtttgaggatgccagacttggtgggagctgaccctggaatccgacctggcctggaggtcaaccaagggtgatggcagaggtgacccatcccctcccctttggcacctcaggatgaccgcccgcacccagccctatgcccattttcatgagtgcaccacctccctgagggctgattagaggagcggggaacagggcctccatctggaggaaggaggtctcgaagcagtggccaccacaggcagtggctttcaggcctctggcagtcgtctctctggagcgttctggctcccaagccccccaccagccgccgcgtggcctgacagcagggggaggccgctttgtctcagggtcaggaacagagaaggtgggctcctgcccccactgggccatgctcagcctcactaggcacaatgtctcctctgtctctgagggaaaatccctctacaggaatcagctttcaggccccgcctggctgtgagggcccccagacgcctgccctgggaggagcccacgcacagggcctggagcggggctgggtggacctcagaccctgaacacctctgggagctcctcggtcagcccagcctgcaggcaaggcgaggaggccccaggctcttcaaaactaacattgggaagtggaaacactttttgtgtctgagactgcatctttttttattctgaattgtcacttggcagggcaccccctcaagaccttctctggtggccttttaagactctggagacaaaatagcccaaatccaggtgtggccgccccatgcagaactctgcctgtgaggtctttgctggaggaggcggcaccacaggccggctggagaggctgtttccaaggagaagcctggagctctgcagcagccctcggggggtcctgccccctctgcctcccttagatgtggacacccagtcccaacagcccctcagcccccgccctgccctcccaggcccacccagaggcgttgtctttcaacgctcatcccacggtcaggaccaacaacggcggcggccccgggcagggattctgttgcccggcagaaagttatttgaccccagcactgatctggttactgatgcagagcgtatcagccgctgcacatggctgccgcccatgacatctgggccagaagctgagccttttcttggaggcggaggttacagtggcagggatgggcacagtggatgatggcgtgcgggtactagaggggatgccaaggcccactcaaagcgccaccactgcacttggcccccacccacctgcaggggagacctcaagagattcacagtaaccccacatgggggtcccagagcctcaggaggcccctcgcctgccccccagcactggctgatgctggcagtgccctgggaagccaaggccactgttacccccattccacagatggggttcagcggcccagagtgtgtgacctcacccacagcacagaaatacaagttcacacaagcaaacaagttggaaaatgctgggttttctcagagaccccttgggaaaaggagcaggagtctctggggaccggaatcccccacaggagggaagacctgggggactcgggctggggcctccaggaagctggatgtgctaggcgttggggtcccagaggcgaggcccctgccgggccaagtggggaactagccaggcctgcgagaagctccaagatgccccctgtccccaggcaccacagccctgtccacacccccagctgttgtgactgagggacttgttccctggtcaggtttcttaatcttgaaactgctgacatttgtggtcagataattctgttgtggggagctgttctgtgcagtggggggtgctcacaacatctctgcctctgcccagtagacaacagtgacaaccagagctatctccttggtcgtgggccaggggctttgatgacagggccctgcctgtgtcagccttcctgggggaggtctagcagcatgcgcggagctttcgtcactcgcctggcagccggggctcttaggaaagcaggtgggaagcaggcggagaccctgtgggttcaaagggcacggggccctgtgctgccagccgaggggtcctgtctgggctgctgcagtggatgcggctcccatcagagggtacagctgtctcccctagaacagaggcctgaacagatgctttcgggccaggagtctgttttatcagacccaggaaggagaccccccagggctccagagacttggctcgggcatcagtgcctggtgaggactctggcacatggagcagctcacgcagctcatacgcagaatctgcagccaggtgggggcttgggtttgggccattgtccgaccctctgcgcctccatttcctacgtaaaaggtgagacacagaagccaatgcccacgccctggaccccccgttcagattcagtgagaccgtgaagcccagcatccacaggggcctgccgggggagggcaccaatgctggcgggtagggaactccccagcccctcccaggccagaggagaacaggggcccagccagaccctttccccccaggcgaggaatgggcgccttctccctgggcccctcctaggaaacttgtggcccctggacccctcttccactcaccacctctgcccccaagggcctcccaaactgcccagggaaggcaccaaccacatcctgtcccagcagttgtaggtaggaagcagcactgaccagcagccttgggccaggcacagctgcccagcgggcatggtggtgttcgtggtggcgttccagatggtgctagggcaggaggcagaaatgcttggagttggggggctgggggcctttcctcccacttcttcatctgaggggtcaagcatccgggtaggacccctccaacccaccaccccccaccccttcccgactgtgtctcgctatccagttttgcaggaatggaattaatgggatccccggacagagccaggagggagaggcccaagctgtctcccaggctgtagtgtcgggggccgaggggtttgcagcaacacttagtaacttaacaggaggaccgtggggcacactctctagaggcgtcctgacctcatcatcatcacaggaaaaccaggcagaggaaggggctatgggctcacaaggagctggccccacaggtgccagagccctccagcccagggcgagccttcacacccctctcttccagctgcctggcccaatgagttgagtgtgattctggctgtgggaagaaaaacattcacaggagagtgggcaggggcaccccaggccgtgcggcttctggagagaggggcacgcctgggagaggcccccactgccacccactggttatggtgggctgtgttctccggcctcccatgcagtccctgccttacccacaggtgcccatggctgagcttgtgttgggctgagccgagtcccgccagctgggaagaagtgcacccaggaggtgggtcaggggaaaggacagttgtctctggaaggaggcttggagatcactgtccctttaagaatgcaggtcctctgccagggctctgattgcgatcacaagtgatgatggcagagtctgcccagagaacagcagcagagccctccgccaagaggggttaaggatgcctttgagacttctggtcacccacttcaccttgggcttgtcaaatcaaatggtggagtttaactctcgcctggccagagccgagcagcaaagctagaggcggggaatgaggctgggtgggcctcagacccaaacacttctgagagctcagcagggaggccctggctggcagacagagcaggaggccccggactcttcagaaactgaaattggaaattggagatgctttttgtgtctaagtcttcatcctttaattgtcacttggcaaggcgtccgctcaaggccttctctggtggccttgtaagaatgcagggacaaaataatgccaatgacagtggccctgaacagagagcagaggcctcacatggcgcccattctcttctgctcttcttcccatctgcccctcgctccctaggcatccccaccacatcccctctcagctcagcgggggctgcctggctgctgcctcagcaggggccacttttctaatcctggggtctcagacacacccttgtgcctccacctcaaatcccaaggcaatatctgccccacagcctcaggacccacttgccagtccaatggcagaacaaacagcccagagaggttgttggggagggtgggtttttgagaagctcttgcagtcatcacgacagagcctcctaagcgagggcgagtcagaccccagaaaccttggatctctggccgagtggaggtgcccctggttcatacaggcccgagctgccctcagggccctcctccctctgcctccagccagagactttctcacctgctgctctggggcagaaatcggagccacctggagtgtgcctgccagggtcagggggtgaggagataagggcctggctttcagctcacaggaagtgggcctgaatgcggagaatagcagcaattccatctgataaggccccgctaaaccccacattgacaggccccaccgcccacccgggctccaggggccaagggaggggccgccagcccactcagccctgcaagctgctcctgcccttcggcctgggagggggccttcctctgccctggcctccatacctccagcacttgggtgggctttgatcacctgtggattgcaggggggaagctgcgcaacttctccactgccccttccccctgccagcctggggggggcgcatactgggagtctggagaaaggcagcccccccccggcacacttggaggtggggggcattcctagcaacccccttcatccccgagtccattgatgaatggaccctctctgcagagaacacagcccaccagggaatcccccagatcaggaccccaggtacagaggggttcaaagcacgtttgttgaatgaatgaatgaatgaatgaacagatgagcgaatagcccaggctccacttccaggctgagtaactactacaaagggacacacatgggacgggggctgccaggagggacttctctgagcctcgttcttcaaggagccagatcccggaaaggaaacacattcgtccaaatcctctaatttgctgcccagaggaatcctggtgcccagggccgctgacagccccttctgtgggaatgggcagagaacagccttcctccccgttgcctggcacccggacccagggctcctgggctgcgtcctgggctcaccgtggctctgctgtgggttaagcaaccccttgttagtaggctccccgctcgggtggaatggctgtgagctgtggcccggccccgtctgtggccagatctgcacacagccccggggggcctcagggactccgggctcatgacacagacatctccacctctcaggatgagggagggtcacctctctgcccaggcagtggctctatcatgcccctaaaacatagactctggccctgggactgggtgtgcattcctgaacaggggacgggcttggaggtcccaccctgccaggctccctgctccgaagcacccgtgggtcccccacctctgtctggccaagcccccgaccctcctgccatggccttcagccccattttcaggctccgcatctcccactttcctgacaatgcgctcacctctttccaggctggcctgatatgggaggtgcgtgcactgggaagtggtaatgagattctgccacgcgctgtgtactcgcttccgagaaaatcatctattaattgattccaattactcttaattgtttctcatacgtttcaattaggcagccctgttgttacagcgggagctggattaggcgagtaatccccaggcctctaatgtcggggtggtgtgggcagtggggggctcggggctgggggaggccgtggggcggctagggagcggtgggggggcgtggcctggccccccctcggttcggtttggtttattttgttttgggggctttatgggctgttgtttttttccattctagatcggtcttatgcttcaagggttgattttttttttattgtggcaaaatacatataagataaatttctaattttaaccattttaaggcgtgtcattcggtgacatttagcacatctgcattgttgtgcaaacaccacttctgccgacttccgagaggctttcaccaccccaggagaaactgcgccccagcagcactcactccccaccgcccgtccccccaggccctgactgcaccccagcagcactcattctcctccgcccatccccccaggccctggcaactgctgacccatccctgttcggcctctggatttgtcctctccatggaattctatgatctgtgtcctttggtgcctggcttctctcactacgcatctgtgttcaaggttcttcctcactgtagcgtgggccagtgcctcactccttttcttggctaatattctgctgcagactcctctgctggtggacatgagttctttccacctcttggcgattttggacagtgctgctatgaacatgagtgtgcctgtttttgtctgaacactgctttcagctctcttgggtctatatctaggcgtgggattgcaggtcacacggccttactcctcagcttacagtggcagagtccaggcagcaaggtggtggggaggagagccaggtgtcctggagaggtgggtgcctgtccctctgcatcagacacagggaggccctcgtgggggtgaaggaggctggagcagaggaggcaggagtagcagagacccccttggcgtggcaggggtctggctcagaaagcacagggccttgtgtgctggagaaggggccacttcccacaacggggaggctgagcagggccagtgctttggcctggctgcaggatctcagaatcttggggctgcatctgaccctaggagtctggaaaccggactccaaaacgtgccctagctttccagctcatgtggagatgcaggaaaaggggcttcagacctagagcagcacggtgagggaggaaagatctgcccctttgatgagcacagacgtctctcctccaaaaagccttcctccgaaggcatctagaaccttctcttggccaagagccatcgcggctaaggtcacagatgtggtggtggggtttggatgtgcgtcccctccaaatctcatgttgaagtgtgatgcctgattttggaggtggagcttggcaggaggcgagtagatcatggatcatggaaggtttggctccatccccttggtgatgagtgagtcccccctcggttagctcatgcgagatctgctttaaaagagtctaggacctccccagcctctccctcttgcccactctatcacatgtcacacgcaggctcccctccccttctgccatgagtaaaagctccctgaggcctcccctgagctgagctgatgctggtgccatgcttatacagcctgcaggaccacgagccaatgaaacctcttttctttacccagcctcaggtgtttctttgaagtaatgcaaaacggcataacacacgtaaagtgcagctgacctggcacaggatttatttaccagcagcgtgagccagggcacagcctgtgattccctgggcagctgcttcctcagctgccaaacggagacaggctcacaaaataacccaaaccccgaggacgagtgtttaccaggccttgagctttcaggaaagagggaagacagagcaggcacagaagcttccagacgatgaactgcagcctggcccagcccagccagggattgccggggttggatgtaggggttgccacaggtcccaccacgtcagggacttccatcaggaagggcacaaaggccagggggagatggcgaggccaatgagtatgcccataacccacccccccacattctctgaagagagccccagatgtcactagggtcatttctgaagtgaagcatggctgaggaccaggtcctcaaattctggctcccacagggtctctgaggttcctggctggccgccatcaactcctcttgtggggaggaaagcgggacagggaaccagcccttgacacctacaatggccacaatgcctgccttgcagaggctgtgcccagtggaggagaccagcccagcccagggcttcctagagaccacggggctctgctccacaaagccaccactgtggcctccaccacctccaggttcacccacgtccttctcacggatctcagctctgcccatcaatcatcatcgccaagtgctcgccgggaacagagcaaacgaacactcaccctcactcagctcatttcactccaacagccatcctgcactgcaggcatttttaatccactttatagatgaggaaacaaggcccctgaggtcgccaactaggatcagcaatggcctgcgccttccgcggagggccatccacgcgtccaaccccataggatgtgcctgtacgaacagcagcaacatgaccccataggctcagagccagagtccccagcgccagccccgccatgtcaagggcacagccagagaggacggggtggcagggagaccaggttcccccctgtggcttcaggagggtgggcgccctgagagaactcgcttcaaggcccctgtccctgcctggaaggagcccagcgtgcgaattccagctgccctgcacagccccagcgtcctgctctgaggcctgagaggaagcgtgtttggggagctggtgtctgggtgcaaagggaagccagatcaccacaccgaggaaggcacttcaaaggagacttttcacagccttccgcttgggaaagtgaatgaaagaacgttattgactgagggctggggccggcctggaaatagcaggacatggaagcccttggaggatggggaacagttcctcccctcagggcgtccgtagagaacacgtccttagcccggtcgcgttagcacgtcgcatgtccgaaagcgtgctcaacaggattctaaagggagcagagtttatttcttttaacttttgactggccaatccaaacaaacaaacaaggcttcaaacagagcattggaggatatctgaaatctaacctttggctgaggttaaaacacacacacacacacacacacacacacacacacacacacccttggacataaatctgcaaataaactttccaaagaaaaacacctacttctttcaaaatccagccttcttccccgttctttctggcatcctggtggaaggtgctggcctggcaggggcaaggaggactcaggagtccacagagcccagctgcccacacctcccctggcaccccagccacctctgcccaggttcacaggaggcccgggggccaagtgccccatgctcctgcactgaagtgtgggagagctcagactggtctccatgaccagcccagccctgctcgctctctctggtcctcagaacctccttactgtgaactccgctccctgaagtcagtcgtggatctgtcaggcagccccacagaggaggctgtgacgtctcgacagcctgcccagagtatcgctgacgctgatgtgcagaaccccaatctccacagctgtgcctgagaacagtgaagatgaagggagagagggtgtggggtctgactgctaggcccagcccctgcattcaggcttactgacctgccaagatagcgggggacatgcatatgtatcggtgtgtgtatcttatgtgcgcatgtgtgcacgtgcgtatatatgtatgttggagtctgtgtgtaggtgtaggcatgtttatctctgtgtatgagcacgtgtgtgtctgtggctgtttgtgtacatgcacatgtgtgtacatgcacatgtgtgtgtgcatgtggaggggtgtgtgtgcatatttgtaagcaaatgcatgcacatgtgtgttggtgtgtctgtgcatgtgtgtttgcatgcacatgtgtgttggagtgagcctgtgtgtgtgcacatacatacacatgtgtgttggtgtgagactgagcgtattcatgcacttgtatgttggtgtgaatctgtgtgtgagtgcatgcatgcacatgtgtgttggtgtgagtctgagtgcatgcatgcacatctgtgttggtgtgagtctgtgagtgcatgcatgcacatgtgtgttggagtgagtgtgtgtatgtgtgcacattcacacacatatgtgtttttgtgaatctgtgagcacatgcatgcacatgtgtgttggtgtgaatctgtgtgtgaatgcctgcatgcacatgtgtgttggtgtgaatctgtgtgtgaatgcatgcatgcacatgtgtgttggagtgagtctgtgtgtgcatgaacattcacacacattgtgttggtctgaatatatgtgcatgtgtgagtgcatgcatccacatgtgtgttggtgtgagtctgtgtgtgaatgcttgtatgcacatgtgttggtgtgagtctgtgagcacatgcatgcacatatgtgttggtgtgaatctgtgtgtgcatgcatgcatgcacatgtgtgttggagtgagtctgtgtgtgcacattcatgcacatctgttggtgtgaatctgtgtgcgtgtgtgagcgcatgcatccacatgagtgttggtgtgagcctctgtgtgaatgcatgcatgcacatatgtgttggtgtgaatctgtgtacatctgtgagtgcatgcatccacatgtgtgttggtgtgagtctctgtgtgtgaatgcatacacgcacatgtgtgttggtgtgagtctgtgtgcatgtgtatctgtgaatcccactgtgaattctaattcaggagacaggagagaaaggccccacctgagagctggcacattcttctccccagtgctctgagcatccccaccgcttcctccatcgaaggcacccaactgctgctcctgaggctgtggccactctcttttctgggagaacaggtttagcagggttcttaggaggtgcttgatttctaaagctgggatcttgtgggttagagtaggggccatgccaggtcaccaagacatcatcaaggggaccatcatcagggacctttgagctagaggcccttggggtgggagctgggggagacccaccaggtgcagaggaaggctgcttggccactgcggggccagcccccaacaggggctgcgggcacacaccatgcaaccatctctgccccaggctggctggctttcccttggtgtgatgctgtgcggttttccatttggtctctctggttggggatccccagagagcacacgatagagttcctggctgaccggcatttccacccctcgccctggtgacctggagcatgacactgagcattggtgctggaacaaaagatggagggaaaagaaacaaaagtcacacgcacaggcccacatgcacggacacacacatgggcacttgtgtacacatagatatgcacacagacacatgtacacacatatgcccacacactggcacgcacatgtgtgaacatagtacacaaaaacacatgcacacaaatgaatacacacagacacatgtgcacacatatagacatgcacacacattcacacagacacgtgtgcatgcacacacgtgtgcacacacatgaacatctagcttcatgaagctctagcctcagctgtcatttattccattctcatccttccagagaaacaggcgcagccgaattctctttgggaagttgcaaggaccctcgcaaggcaggagaagggggcatactgggccccaagcctcccagatgccagggcttccgtggtcctgccaggggctcctgtggcctcagatgagaagccccgtggggaacagatgttcccttgctcctctggggcccaattcgaggccccaggacatttggcctctaggcttatcacaaacacactgtccagggagcaagtgctctgtttacccttcagttatctgagcagtgaaccaagaagctagggccaaggtgccctcctggcttccaacccgacttcctcatttcagaggctcctttccaagtggggacggggtgcccggggaaagccgcctcttctgtctgactgcccagggtggccagttgatgagtatctcaccagggcttggcctctgggtgctcagcccctccacctccggcctgataacccgggctccaccactcagggtcccacgccatgagggctgcttggctggctggggaagctcctggaacccaggggcttgtggctaccatgccctcctggagccccagaggcagccaggacagaaagtgtctgagcacaggccaggccagggtcctctctgggcaggacacactgtggacacacatgccaccgtcctgttttctttggagctgactgcagcaggccgagcccatgaggacaggccagcagagaaagggctgtctgatggcagtggaccatttctgcccttttctgtgcggctgtgctgagctccccagagcccagcaagcaggaagaagcccgttgtgacagtgacaggcaccccagcagctgccattcaggccaaggagaggcagtttggagccctgctgctgtctggggagagttgcagcttcaaggcgatcgatggggagcttccgtgcactcccctctctggcctccccatgtcccgcctttccgggtgctcagaggcatctcctgctctctccttctggagggcagcttcctggccaccctcacctccagctgctgaaagccgaaccacgttttgtgggatactgcccccgagggagacagctcacccacccaccacagtaccatcaaagacagacgtcctgcttgtctcggtatccctggcccttgcccagggtgaggcacagggtgggcctccgcgcatccgtgcccggaagcaggaacagagggatgggtggatgagtggcaaccatcctgggtggtcagtaggaccctagaaagtgctcagagcagagcggaaagggcatgacccctacccagtgaatccacaggggcttcctggaggaagtgctacttaggctgggatttcaagagcaacaaagctttgttgcccaccgagcgattcaggcagtgaggtgggaaggagcgtgggaggaggctgcggagcgaccattgccttggtctcgctcacacctcccaccttgctcgtgaaggtgacagtcctactgcggacccctggctgcattgtgtgtgtggtggggggtgtgcagagctcagttaccccatctgcctcagcctccctcagaactgtgggagacggggctaaactcccccctcacctgcctcaccattcccttccccagctgctggaatcctcagagagcccctgtcactcaaagggaggaagaatccactctggccagggccggtgctagggcagcccagctcagtcccataggaagatgcggttctgtgcagcagctgaggttggaagggccaccaggcaagtggggctggggggaacaggtgtgccatcccccgagcgtgcctcctcctctccctgggacccgcgtgaaatttctgtctgatgctccgtcaatggcaggcgatctctgctgcgtatggacggattcgctgcccaggtttgcaggtccatcctctggaatctgctgtcaagtagcttcatgggtaaagtgtgaccctatttcctttgggtaaaacacaggtgggggcttccaggtctgggtctgcctcgggggatcctctgctgtggtagccgagtccttacctgggccctttgcacactgtaccccctaaatccccaagcagaccccacgagcccaccctccaagccaccattgcccctcggagggaggtacaggtggtggcctctccctcccttcaccccgttcctgaaacaatttggggacagatggcaccagtgtgaggcaggagcgtttacctgatccccatctcagaggtgctgcaaaacgccataaataccaaacacccgctcccggagagccagcgccatggatcagtgcatctggggatgtctggaacattccgagggaaaataaaacaattatttttgacaacttgcatcaataccatctacgtttttccccctgcacagggctccctcccccactctgagtctgtcccttctacgcgtgtctgtgtcttcaggaaatagagccgggacactcaataagccaattgttagctccatcgatcttatttgggggcctgaaaattcagcagccagcacagtgttaaattattaactaaatgtttccactcactggggacgtgttttgtaaaggccatctagatgaacaacggcctctttatgaaattaacagccaaaatggtgtcagggtgtggggcagaagtcatggggtggctgaaggcagaaggccctgtgcacctccagactggaggacagaggtgaagctggcattgggggccgtgctgcagcaggacagagctggctggagtcctccctggaggaaggggagcatggcccccgtgagctgaccccagcgcaccttccctcgggctgtgtggcagctgaaggctccaggctagggagggggatgtgtccaaccccgcacgctccttggccaagttgctgccccctgagccctcgtttctccccctctgagccctcgtttctccccctctgagccctcgtttctcctgggctatgatgggtgagccatccaggccacagaggatgtagcagagctgagcaagctccagagtgcaaagctctcgagaagtgactgtcgcctggtgggtgtggcagatggcggctgtcttaccccagccaggtttccatccccgttggcaagggtaggtctcagagggagtgaccagggctcacctgtcctccttcagaggctgcaggccctgggccttgtggttgcagctgctgccttagagagcttcccatccagaggggaagcaaggggggcaacctggcgactttgccccatgcttcctaagcagctcctgaatggaagaatcggggtggtctggcagatggagatcagtgtccggccagcctggctagcgagacccgccgtgaagcacagacaaagaggaagaaaccaggatgtcagaacacacacacacacgcgtgcgcacacacacagagggtccctaacttacgatcgctcaacttaggaatgtttggctttacgacggtggagaagtgatcataataattcaatagaaaacatacgtcgggttttgagttttgatattttcccagctatcaatttgtggcccaacaccctcttgctgtgtggggcaacagcagcagctgccgctcccaggccagccacacagtcatgagggtgaaccgcccgcgctctgcagcgcactgtgtggccagacggtgttgcctgactgtaagatttccgaggacatctgaggcaggtgagtccgggctgtcttcttcgggtaggttaggtgtattaaattcatttggctcacaatattttcaatttatgatgagcttcttgggaggtaaccccatctcaagttgaaaagcacctgtcctttttaaatgtaaggatgggaaagaccatgattgaggttgcaggttgctggtgatcttcccagcccagccgtgctcagcctggatgaggcagctagggaaacccagggtgcacgatggcctctgagaggggagcctcgtgccggcgtggctcacctgtgccaccaacaccctccccaccgaaccccagaagtaaccttggaacccacagttccataccaggtccttgggagaatgaatgaacatattcctaagacaatactctcccaactcccaaaacacttcaagttatttgtggaaagttccaggggaggaaaattaacaactcaaacctgagaagccctctgggcaggtgggagcaaccaagccacccactacttcagtggccccttctgccacgtcacctctctgcctgcaggcaaggcagcttgctaaaataagtgtccacagttagcagtggctagaataggaagtgacagaggtgagtctcaaaccaggcagtctggcctcagagcccccatgcctgtatgatgtgtgatatatacggtagcctatacgtaccatgagggcacacttggatgactttgacacacgtagccaccactagaatcaacagaaggcttttccatcactcctggtctcttccagtcaatatcccccaagggcaaatggccagccgctgttctgatgtctatcaccttggattcattttacctgtctttgaactccgcataaagacatccacgcataaggcactgttttgtagccagtttcttttgttcgacatgaggatgtctgagggctatctatgccactgcacttgtcagctgcgtgttcttttattctgtatggcagtagcatgcatggtatgaatagatcccaggttgtctatccactgtcctaggcatgggcgttttgggttgtatcagatgtgggctattacagataaagtttctacaagtattcatgtgcaagcattgtgtggacttaagttttcaactcatttcattttgatataaattgtccaggagtaaaattgttcactagtaggatacatgaatgtctacatttatgagacaaattgctttccaaaaagttgtactattttgcatttccaccagcggcaatgtgtgagtgttccagctgctccggtcctcaccgacacttagtgtagtcagtcttttacattataaccgtttgagtgagtgtgaaagaatatctcattgtggatctagtatgcatttcccagatgaattgtgatattttcactgggtataagtgcttttgtgaagtgttcgttcaagccttttgtccatttttaaattggattgtttgtctttttatcaattgatttttagatctttatgtatcctagatacaagtccttagtcgtttatatgtattacaaatatttttccccaatgagtggcctggctttttattttcttagctgagtcttttgattggtgaatgctttaaatctcttcctttgggtttagtgctttgttcagactttttttttttaatttttgctttacttcctagctcttctctcctcctgggactccagttacatatgtatcagatattgtcccacatatcgctcaggctcttttcctttggtttcagcttttggtttttgttttgttttgttttttttgagatggagtctcgctctgtcacccagcctggagtgcagtggtgcaatctcagctcactacaagctccgcctcccgggttctccgcctccgccattctcctgcctcagcctcccaagtagctgggactacaggcatccaccaccatgccgggctaatttttttgtatttttagtagagacaggctttcaccatgttagccaggatggtctcaatctcctgaccttgtgatccacccacctcggcctcccaaagtgctgggattacaggtgtgagccaccgctcccagcctggtttcagtatattttttctattatttagattggataattttatggatctgttttcaagttcactcaccctttcttctgtcatctccaacttgctgttaaaagcccatccttgggctgggtgtggtggctcatgctggtgatcccagtgctctgggaggctgagctgggaggatcacttgtggccaggagttctagaccagcctggacaacataacaagactccctctctacaaaaacattaaacaattagtcggttgcgatggtgcaccgtcatagtcctagctacttgcaaggctaagatgggaagatggtttgagcccaggatcacgtcactgccctccagcctggataacagagcaagatcccatctaaaaaaaaaactaagcctatctagggacttgttatttcatgcagtatacttttctgttttggaattttcttttggtttttaattataattggcatttccctgttggcatttcccctctgttagttcattgtgattacctttgcctttaagtctttggacatatttataaggtatttttaaatctgctgattctaacatctggctcatatcagagttggtttggattggctgtggttttttctaggctatgggtgacaatttcctgtttctgtgcacatttagtaattttttattgtattggatgttgtagatgacattgtagaaactctggattctgttgtattcctctgaaaagttttggttttggttctagagagagtttcaatcactaggtgctcaccctgagtttgcagaagtgtggctctacactttattaggttgggtcttcttctgttttatctttaggattagtctttgttcttaaggctcagcccttctgggactttagtggaaagccaaaggtgatcatcaagctcttctaagttgatgggactcaaattccaaagccctgctgtggtaagcagcaagtgaaatctctgtgtagctcttgttttctgtggggccctttgcaacctccctcatgcatgagcaattcaggggtttgaggggtgtatatgcacacaggaggatcatgtctctgtggctccttcctttccatggtttctcccctcaacttacagatgctctgacagcctcacactgcatcctctgacccatctgtcccataagactgcagctttctgcccgagttccagctgccctgtaccaagtaggctgcacagtggccttgagggaatacctggaggacagtggccctcacagtgcactgctttccttcaagggttcagttcctccagttcccacctgctttttgttattctctagtgctatcaagttttttttgttttaaattatttttttccaagtgtatcattgttatctgcaggagagtacatccaacagaagctactctaccactgtgggaaccggaggctcctgggccccactctttattatgccacatgcacatccattttaagccaacagccacacgcacctccactgtgagttctgtggcctcattctgtcatccttgccatagccctaggaagtggctagcacggcagcatccattttacaggtggcaataatgaggttcaaactggccaagtaccccacctaaggacactcagccagtaggaatgggacttgggtcttgaatcctgaggtgctgatggcaaatcccatgttcttcccactgttggttccaaatgtgtcaccgggatgcagcaggaccccctctgtggtccaggccacccctcgggtcctcccatgctgccctctcgggtcctcccgtgctgccccctctgtggtccaggccacccctcgggtcctcccgtgctgccccctctgtggtccaggccaccccttggttcctcctgtgctgccctctcgggtcctcccgtgctgccctctgcagccgagggtttttcttggcagctgtctcactccacccagagctacacagtccccccaccctgggctcctgggagccaacaagagccccaaagaggccacgtggctgtgggccagggtctcccccatccaggggcctgcggaggggctgcctgtgagcgtgcatatcaaagggggcattgaggggcgggctccaaggagactcattctccgtcaacacccacaatgtgggctttgtgagacctggcaaggctgcgctgagctgagcgagaactttcctttttctcctagggagagattatttaatttaaaaataattgaatgtggaaaatgttggatatggaaactgtttatcaggcttccttttttgtttctcccgttggccctgccccacggcggtgagcgacgtacccttccccaggacgtcttggaggtgtttgtgcgtcgagttctgtgtgacataggctgggggcttgggggcttccagtggaggagcctgatggagctccatggtcaagagggcctggaaaagtcagggccttgggcagaacacgggggcctgcctggtgctcaaagcacagggcggaacactctggagacactgctgtcccacggttcctgttcagcagcctgagctcctcctggagcacccgcggcatacgtggccctcccgcctctctgctcaccctgctgtctcctttctctcccctccaccgtccccagtctttgggggcaggcaacacagacaccccctccacctgcgagcctctcgatggccagccaggcccacccctcactcctccaagctggctgcaaggaggcacaggcagatgcatcttctcaccccggctgcacccagactggggtcacttctggtgcccaacagcacccaccccactgtgaggtgagggtgggtggctctacaagggaaggggctcctctcacgttcgcccgccccagtggcctagtgaccggctgaacagacggaatgagtgaccatgcaaccaagtggctcctgagcagttcctaacactgttcaccggtgctctgccgctcccctttcgtgcttccatctgtaaaatgagggactccaggcaggccctggggacacctgagtgtcagggctggctttgcaacctaatcctctccagaagtgcgcagcactcaccggcagcttgggacacccatgaagtaacttgcagcgaccaccttgagggcctcacaggtgtccaggaaacccaggtgcccagtctttccggggagggtggagggggtcagtgtacagccccgggagtgtgagtgtgggaaggggcaggcggccgtccctcccaggacactggttcctggatgatggtctttccacaaggttctgcaccaggcagacaggcagaggggctccatccagcccagaggtggccccaatgcttaaagcgcctccaccccattccagaaggagaaaccaggcccagggagggcgagactctcagggcctccatgcatgctggccacagccactggctccctggcattggcccaggaaggagcccggaacaccctgggcctggcccacggtggtgcaggtcccactggcgagagccatccatctgctcctggaaggccccgccctcctgcgtctggtcccaggcaggctctgtgcacactgggtgggaacaagggcctgtagaatcaaggcaagaggcagtcagggggtgggggtgggggcagagccgtctctcactgctggggaaggtcagtcctcggagtagcttgggagtccatgaccctgccccaggtcccactttggagtcatttggctcttctcagacttctggggtagcaaagctgaatgggcaggttccgggctaaggagcaaacaccatgcctaggccttggtgagagctgcgggctcccctgatccagatctggcctgatgcctgctccaaagcccctgagggctctgggctggggcgggaacaggaagggcagccacctggtagtgtggtcaggaggaaggggttccttgtgcaaagcagctgcccgagcccatcccctgtgacttcagggtcctggcagtgtctgtgagcagccccagagctggtgccgggcactgagttccgtgagcctctggacacggggctgtgcatctcggtggctcagtctgctttggccgaggctagaaccgaacttctggtcaggctgcccatgcctctggtcggagcacggggcagcctgtgtccatctgctggcagcaggcagagttctgcccaggtcgcagaggggttgctgagtctccccaacccacgtcccagcctggggggtctggcccaaccgtagccctctgggcccctgaacagttctgcagggttttggctgcaaggatgaggctcgctggctcagcccaggaccataggaatctgcccatgccatgcagccctcagtgcccacaaaggctgggctccaggccctgagctttttggagcaactactcggctgcctggccaggtcactcgttagtattcgtgtgctagggcccaggagaagcagagagtggagagaggccagcggtgggggcagctcttcagcaccatccccaaaatccgcgggccaaggacatttggacaaagagctgtcttcattgagagcagtgggcacggcttctgctgcccacaaaggcggcttgaatgggcagggacagtggggagggacatgcacgcttcttaaagaggccctccgccatggcctccagcagaaggaggggggcttccccggagctttgaactcacagtgcccctcttgagacatgaccttgaatgtcaggtgccaccaagccctgtccctgtctcctgacactagctgttcagttcttcacaggaacagtctgtcctcccctctgcccttggggaccggggccgcagtgagcctggggtgggggccctggggctcacccaactccacccactctcccaaagagctcagagcttcccgcatctgcagtgggcagtttttccacccaggccagcaaaaatgagggagcggcccatgtcctagagtccgtggtggggagaggcacctgatggggcacctcactttgagaggcattaagagaagggtccaccggggcagcgctggcctgggaacagcccactggcatggctctgtgctcctgcctttggtgggggtgggggcggggcccagcatggccggagaggctggggctttgtaataatcaccataacgattattgaatttgaaaagccaggagtcaatgcatttctgcacgattttgtcagcaacaaaccacagcctcgccctgccccacctccgtccgcatagtgcccatggccaggctgtctgggcgcagcattcctgggcctgctctctggctcccagtgagggtccccgccccacgggagataagatagagctggtgtcagggaggaggtgtggacggggccgcaccggcacgctgtgagtgataaaaggggctttggaaaggtgctgacgtggcaccgtgcttaatgaggtcatcgccgaagctgctgccccgataacctggaggtcaggctcccagcaagtggccatggcgggaagcagggctgtctgcactgcccgtctccacccagcacccagtcggcgcagccactgggtgcccatggggcttggctccgagcttatttcagagctgtcatcctcaacccaagggtgtccttgtcccggggcagctgacccctctttcccactggctggtgtgctggcaagggtggcggaggagccgaggcagcccggcagagctcagggccgcccgtgaaagccagccttggatggtagcttcccctccctcccactccaatgcaccccggcttcctgcgctctgggggtcttcaaagctccctggctgagctgtctactgggagctttctgttctcagtgttcacagaggcctgagctctgctggccacggtgctgggcttggggattgaggagcctccagccctcagcctccgcagcccccgcagcctccaaagcccggggctgggcttgctcaggcgccctctgccgtgaatgtttagctctgctccctcccacctcttgaaagcagcctcttctgtgcctagcggggtcctgagccctggaggagacagcagtcagaggcctggacctgactcctgtctttgaggggggaagaggacagggcagaaaagacctggggccaggtgcagtggcccaaaatcccagcaccttgggaggccaaggcgggaggaagcccagaagtttgaggccagcctggacaacatagcaagaccctatctctacaaaaaatacaaaaattagcctgatgtgatggcatgtgctggtagttccagctactcaggaggctgaggcaggaggatcgcttgagctcaggaggtccgggctacagagagctgtgatcacaccactatactccagcctgggcgagagagtgagaccctgtctcaaaaaaatgaaaagaaaagatctggaagtgggaggggaggcggctctctacctccaacctgggcacccttgaagccaccccctctttccctcctgggctctactgctccgtctgtgcagcctggggctgcagtcagggtcaggtttggtgacacttggatccagacataatgtgtgttaagatcaagggccccgggctgatgtggcctcccagcagcctgcaggacaaggggaggggaccagggtggcaggcagctgtgggcgggtggaaagcagagctgggagccagccctgcccggccagggctcgggcacagcttggctccatgcagggccctgggagcacccagaaggcagggctttggcaccatgcagcctcccagatggccgggccgggctggttcctccctcccaggacaagagctttgtgtctgccgacttcttcccaatgccgcgtccagtgttttcctctttctgggcctcaaactcttttttgaggccaggtgggtggggcccagccagcgccaggcacttctggctgggggatatacaccccccagtccttgcagagcccactctgaaggggacttggggattcacttcagctctcgctttattatggagcctgggagaaaaacaagtcagaagaccatttccaaaaatagccagcagagagcgggaactgtctgcagagctgctggttggcggccctctgggcaggggcacagacaggccaagagatccccgtgtcctgggaatggccgctggctcgctgggccagacgttttgggggcatgttcaccagcttgtgggtctctgagatgtgggtctcagaagcacctgcttcccacggggtccaccccggcccctggccagtgccagctctcatccccaccaggcacttgggtggccacagggtgtccctcccggtccctccaggtggaaaagactctgtttggcacaggcattttgaagacccaggagagacttctgattgaggaactcctgctctcctgggctgggtttagggaaaaagctccatccagggcccacgtggggtcccagaatttcttcagaacccagaacccgtctctataggaacgcagagggagcagcacagggacataggtcttctccttcccatccctggtcctggagcaggtgcctgggccctcagctcactgtgtcacattggaacccgtctctgtccccctccctctctgtccccctccctctctcatccccttcctccttctctccctccctctctcttcccctccctctctctccccctccctctctccccctccctctctctccatctctctctctcccctccctctttctcccctccctctttctctcctccctctgtctctcccttcctctgtctccccctccctctgtctctcctctccctctctcccccccctctgtttctcttcttccctccctctctcttgctctctctcaccatagcccctcctcttgcagtctccagccatttggggggttccgcctcccccttgagaactcacacactcactctgtgtctgtgacttggtatggaagggagagctgggggcggggaggcactgatgcctgagggtagctgggctgtaccatcctcagcctcgcccagaccctccagagaccctaaggacctccccaaagagcaagatgaccacacactttacctccagaggagaggagacactcctgcgagggaatggggagcacagtgtgaatgactctgggcagcatgaccagctcagacagccccaggccaaccctggcacaccggtgcatggtccacctgcctggcacagtccacctgcccggccctggcactgcagggtgtgggcccttctccctccgtgtttggccctctctgccatgggctggtgctcccctccacccagccgtgctgcccccacctgcggactgattcaattctgcccccatcccagccgtgcccacccctcccacgacttcccacggcagagttgtggtcctggcggctggctgcagcttttaattgtttttctccccccagatgctctccactgaccctccctcccctccgaagccggcgccccccttgctgcccgcagtgggctgggggaggggacacggattccagtagcatttccgccctccgctctatcatttcgtttgttctcctttcctttccctttcttctccctccacgggcccagcctctgtgattaagcctcaaggcctcctgctgcttttaataggcctgcgggcctgaccatctgatgagaaccgcgcagcacagcttgttcccgaatacttgcgctggaatcgcctaatgcacggtattaatcatcactgtcaggccgttcaggccctaaatacacccacccagtataaaattatcctaaacagaaaagaagcaggctgcgattggccgcatattgaaaacagacatgagacagcccccgcccccaactcatccccctcccaaatttcagggccgcctccaaggcctctgcccggtgtcaggaacaatagctagctctcggtggcagtcaggccgcatttggtgttcacacaagtcccacgtcggggagggggccgtcctctgcacagggccctgagtgcccaccctgcaggcttcggggcccatgcgtggccggaggcagagggcttcccggttgggctgagggctgtttcagagcagtgccctgaggaggaccaggcctggggctctggagccagaagtcaggaaagggaggctgcagccgcacacccgaagagctcgaaagctggcccccagcccagactcccacgcagggacgtccctcacagcaggatttgctgcttcctcctgaccaatgccctcctgtagtaaaagttaaccgggtgtgaaatgcatgttgcctgaggtgcggtaaaagtttacgagggctgggcagctcctaggcatgggcaggcccatttctcacctgcagcctgggtccctgcagaaacctggctcggcctgggggctatggcagggccctcattgggtgagggaggcccggggtatttcttgccacatctgaaattggacccgaatgcgcatggggacaccatcctgcagcctctgcgtttgtccttggggtcattgaggaatctcagcactggccctggcttctggcaggcacctgggccatgggagcccaagggtggctccctcgggccaccccgttacactccagccaagtactgggggccacgggctgagggcacaggccacaggggatgagtccagccccgcagtgtgaccggcagttggcaaaccattgactcaggccacctcactgcacccacaggctttgcagagagaacaggacaatcctagctcaggctggtggaggtttggggatgccgaagcagccagagagtggccaagggggttgcacttggggccggacctcctgactcctgcctctgtgtcttgtcaccaggccttaccctggggacccctgctcccagcggagccagtagtgatgacaggcgcagctgggagcagcttggtagacctagggggtctttctagaagccaagggggcccttggcacacacatgtggatgcagggctgcccacccaacactgctgagcccacacaggcccaagagaaaagggaagtgtggccaactctggactcccagtagctttctcctgcccagccacgcccatggaaccgggtcctggtccaggcacttgtctcccgtgaattccagagagaaaccttaagcgattacaaatgtctattaaacattaaatggtggtggattctggactgcagagcatttgagacgctgcagataaagaaccattgctaggccgggtgtggcggctcaggcctgtaatcctagcactttggcaggccgaggtgggtggatcacctgaggtcaggagtttgagaccagcctggccaacttagggaaaccccgtctctactaaaaatacaaaaattagccaggcgttgtggtgcgtgtctgtaatctcagctactcaggaggctgaggcaggagaatcgcttgaatccaggaggcagaggtttcagtgagccgagattgcaccactgcactccagcctgggtgacagggcgagactctgcctcaaaaaaaaaaaaaaaaaaaataccttgcttagagctgccaccagattctccactgcattccttggggtcatccaggccctcagccctttgaccacaggcactggccataggtggacaaggtcacagaggggccatgggagctcagaaccaccttctccaggctggggtgtctggtgttccagctctgtgctgctggggtgtctgcagagcgttccatttctattggataatttcctttcctcttcgctgagtcagtgccagctccaaggctacgacagagcaggctgggaccaggacgtctaaatcctgacccaggcaagaggctcctgataccaagtcatgcacagacaggaggggacatttcgatggatggcgaggtctcctctctcccagaggagagtgccctgtgttcccaggcagaagaggcaggaccgggccgcaccatgaagggctacctggccaggtctgcacctgctgaagggagtggggtcagtcattccagagcttgggggaggcggaaatctgaccagaggcagaaacctgtagagtgctctgtggctgagcaccaggggggaacccaccgggacaaagccaggactgctgccctgagaccaggcctcccgcaccgataccaggcctctcgccttgagaccaggcctcatagtgctgaggattggatcgtgggccacagaacacccagacctgaaggtgtgccggggagctccgagctccaggctctgcagctgcatctggggccagggcctgaggcctggcaggagggggagggagaggagtacagagtggaggcctccggggtatcaggtacaaagtgagaagggcctaatgcagggagatggccacacccacccacccaccatctgacctcacgaattaattgcgcctgctcttccaacacagcttctctttccatttcttcagcctggcggggggcttggcctccattttcctgtctcccaggcaaggggttgaactaaacagtccctactggttggtgccaccctggggagctaggtctcaggggctctgctggttgcagctcttgtttgaaggagggagttttgcagggaccctgacgctacagccaggcgtgcccaagaacaataaaaacaagggcagcatccgctcgacggtgggtgctctcctgctggggggaccgctatcctggccacacaccttcactcttgtggccccggaccctcagcacctctcagaccacacagatgagaaactggggccgggagaagtgcagccgccaccctgagggtctgaaccgttcaggggttgcggtccacttgcccccaagacagtgcactgccatgtgggggtacacaaggctgctggctcagaggccagtcctgcccgcccagcctgtgtgtctgtgaaaatcagggtgccctgcagatctcagacccttcctcccccaaacaccccccaaacaccctggccgtaagatctgaggtgaatgtgagcaaagacgcctttccccactcctctgggcacatcctgatgagtggcccgttggtgacaagttgacagaggggcccctccgtgacaggtgatggactttgaacccagtgcagctttcagggcccaagacctttcatgttcttctggaaacggtgccattggcttttcccatgactcccacgagggcgttagcagaacctccctcatcttgagcaaatcacgtcctttcgcacaccagcacgcgggcacagatgaatcacgcagggggcttgagcaggccgacgtgtctggtgtttgtggaattgttccaaagccccccccagcccccctgcgccaagccaccatctctaaaggtgacagtgcccctggccagggcggccactctggcctgatgcatgaccgtctgctcaggacgtgcggctgccgtctcatcaggcggagggaggtccgacgccgtgtccacacccaatctgccctccggggagacgggagtgggggaggcaagcatttgaaatcctccctttccaacagagaaacactgttggggagacggtcagaggaggctgcccccagctctgcttttccttgcctgggtgcagagtatttaaaaataaaagccgcagctgccaagacagcccatggagcgtttgctgtgtctggacgctgttctaaggagcgcttcacatagatgatcttagcctgccccagagcggccccaggaggaggcactgtctctaaacccactttacagaccagcaagctgacagcaggagatgtgaagtcactgggcagatcgagcagctcgggaaggtgggcacgggacagatccaggctcagaggtgagagtcctggagaccgggccagtgtggcggttccttatctccagctctgggatcgataaactgtagggaccctcagaacccaggtgccggctggctaccccggatcccggcagcgggagggccgagtctcctgagagccgggtggctttgctttccatcccacagaccctggagcaaacacactgcctggactttgtccagatgcagaggctacacccagctgcagcttgcccacagcagccccaactgaggaccctgaaagttgctgccatcctcaggcgggtgcagaaaaggagtttctgctgtgcgaaggacccccagccccaaggaaggctgcatgccggccctgtctctgctgtctggggccgggccctgggaagcctcagcagccagtccacctgcgggcggacctggctcttggcccccagggtctgcgtgcctccacctgggccatgaacggggacctaactgttaggccctgctgtgccctcctgaaaacgaaggctgcattcctgctcttcatggctggatacacctagtggcctcttgttaaatgccagccccaccccccgccccgagctggaaaaccttcagccgtgtgcttccctcctgggtctccagctccagccgtgggaaatggagcacagtcgacaggcaggatggagagtctcaccacggggcctggccagtggccccaggaggctcagggtcagagctttccagagccctggatccgcccctccttccccttgatccaggaagcgccgttccccccacgggcccccagccagtgctgatggagaggggcagccggcccacagggcatcatcctcagtcctgttctgacgcttaacccaccctcttcctgcccagtcgtctacgcccatggccgcgagcgcctctgcctccggagcagtggccttccagcagcacttctcaacccagggccactctgacccccaggggacactggcaacacctggagatggttgtggttgtcacctctgggggtgctgctggcatctggtagctggcacgtaggagccctgccccacatcctgcagtgcccaggacaggtcccacagcaggaagtgacccagacccaatcgtcccccatggtgaggcagagaaaccctgtggtctcatacagcgaaagcactgacccacactgaccatgaggcaagaggcccactcgtgagccttgctgtgcccttcactgacatgctcgcccatgagctgagtctgccttgaccactgaaggaggctgccctggctaacggcggtgcccagtggcctggcctcacgcgtgggtccatcccggaaccacacagtgggcctggccatgacccccttgcccagggcaacgtggaccacacagacacggtgcaataggccactttctggccttggagggaagtttgtcttcctccctgtacacagataaagtcaccatgagactcccggttctgcctcctggggacccagcctgcctgctggggaaccgtagttacgcaggtcctgaactgggtcttctctggatgcgagaccttccccctggctgagggtgctggagaagacctgggcagtgggtggcagccatggggactgatggcaaaagacctcggcgggtacagaaaatctcccacagtggaggaggtgttgtctccagaggcagccgctgcgccccagactcccagccgcggcttcggatgcagctggaataaggttccagtgttccctttcccgtcaccaggcagagccccgaattctccactggggccggaagaggagctctcggacccctccctcctgccctcagccctctccgaagagctcagaaacatctccgattggaacacgacacagaccatccttcccagagcagcaggccggctggggctcccgtgaacaaatatcgccacgtgtgcgcgatcagagctgagtaacctgctccaaacccaggacactgtgtgtgagtcccacctccttccagtctccacaaagtcacagtgtgtgatgattcctgccggggaggagggagctcattccaaactcaagccattttgaggaaaacagacacccctcttgggccgcagaggaggtggggaagccgtgaagatgttctccatggccggctcccatgaggaatcagagggggaaagcacagccgctgtggctcatgttgtcatcttgggtcgcattacagccagttgactcgcggagtcctcactggccaactagagtcttcaaatcaaccaatgtccattatttggagggtctcactctgtcacccaggctggagtgcagtggctccatcacggcacactgcagcctccacctcccgggctcaagcgatcctccctcctcagcctcccgagtagctgggactacaggcaggtgccaccgtgcctagttaatatgtccattttgtgttgacttggggtctcactatgttccccaggcttatacacatttttaaatgcagacttgttgaagttgctgaccctcctggccaagggcagctgcctttgtcctggatgtcaatgtccatgaaaacagcctcagaactatcagggtctcccttccgaccagggcctgaggcagagcttccagagaccctgcacatggaacacattggaagcccttgtcgggtgccaccttctaagtaaacacacttaaaaaagcacaaagcagcaagaattgcggcccgggagcagtggctgcagcctcccgaggtgagcctgtctgcaccatctgcatcgcatctctccctgcagctactccaggctcgggtttcagcctcccctccacctgtcaccgttgtttatcctcctcagcactcacagccccatctctctgggccttgtcttaaagggtctttagaaaatttttggcaatcttgacttctttcccccttggaaaaaaagcgtcctctgtgtgcctgaggggaacgcactgggttgatccctcagcggcagccagaaggcaaggcgggaaaaacgagcctggcctgaaaccacgcccgtgctcaaagtgatgtttacttagaaggtggcacccgacaagggcttccaatgtgttccatgtgcaggatctcttggaagacggatgccgtgtgcacgcaaagacggcagccagctcctcacagaaggccgcccggctcagaacaggtcccttcagccggctcagcagccagtgagaagcaacagcaaacgtaattaactccatgcgttcccgttagcgggccgccatcccttgtccccaactgtcacatctctgaaagctctggtaaatgaatcgaacacttcttttatctcatcgtccaggacatggcgctgtaatgctgaacatatgtgcagagtttgtgtgttcttgatcgggaacgggaggcccaggacacgttttctgtggcagctcgaatgcagctgagggcgcttgcgggccagagcgaccagtcccctctagaagcagcggagtcttctggagcctgtgctggctctttgttgttggatgaacaagtcttctaggctctgccttgccaggatggagcaccctcatgctctgtgatgggtgtgccgggccacaggtccccagccagaaacagaggctaagaactatgccagaggttttggttcacctctgtcaccggctgacaccaccgacacgttgtccttaggcaccagacctgccagtgagcccccagcagagcccggtccaagtgcgggatggactgtggcgtagatgctgggaagaggtgtccactgctctgtggctgtccagtcactgcccttacatccagagacccccgctcacagcagaggaggagggccatcagagccaggtgccactctgatgccctccctaggtcccgtggggaggagagaaggctacgtgggcctctgggcagacctgggtgggacaagcacagggcccagcacgcccatcgggacaggagtccaactgaccgagtgctgtggccacagcgcccgcagatgacaacaggagcggaagagccatcccacccgcctggctcccagcaggaccccctgactcaggccctgctgggaccaggccactgcattttccccaagtggaacatccctggaaagtcacaaacatggggccagatgtgcgggtgccgtcccgcggcgggaacgaggcaggtggctggcggccggagtctatgcactctcgttttctcggcggagccacttgtgtgtgctggagcgaggacactgactaacaacggcggcagtgtctgcggaacagcgttccattgagcgcaggaaaggccttttgaagtggggacagttttaagaggcagcattcctcgcctcacatttcggctctggggcgtggacagagggtgccacagataccctttgggaggcccccgtccccctttaaaccaagcagctgctttcaccgtcacagcctgtgggccgtctcccctgggaccctcctcagcatgggcttcagctgcacgccagcccccaacagggctggagacggggtctctggggatgacgtgttgaagccgtccaggacccagagccacactgagcactcatggcctagaccctccaccgatgtctgggcagctgccccctccctcacagccagcaggcagaacgacccctgaaagttgtgtgtagcacaagataattgcagttttgtggaggaaaggaaaaggctacaaagaaaagggtatctgtggaacgtggccctgctgttcctgcatgccacagtccacatcctacccagctggaaccctgaagctcacctggggcataacaccggcccaactgtgagctcctcggatcgggagcagatggggaatcggaaggatggtgttgtggggcttttggagaagaccccacatgggctggggtgaagagtggaacagaaggctatgtgaccaggtggtgagaagtgactgtgacccgggagcgagggcaggtggtgagaagtgacgcggtctgggagggcaggaggtgagaagtgactgcggtccaggagggcaggtggtgagaagtgactgtggcccaggagggcaggtggtgagaagtgactgtggcccaggagggagggcaggtggtgagaagtgactgcggtccaggagggcaggtggtgagaagtgaccgcggcccaggagggcaggtggtgagaagtgaccgtggcccaggagggcaggtggtgagaagtgaccgtggcccaggagggcaggtggtgagaagtgactgtggcccgggaggggtgtctgctggtagccagctggtcccggggacatctgtctggaaggtgaaggaagacacctgtgttcactcagtcccatcccgaggcagacatttctccaaggagcatggagtggcctcaactccttcccctgcctttgtcttcattctagtcctggtgaccctgtcctccttctagcagacgtgccaccggcacatgagtgagtgcaaatgtcaaacatgatggaaagttctggagccatgcatagcgggcacgtggtgtgtatgcttgtccaccctctgcatgggacacccaggcgtccttccacctgggaaccaggcaatcaaagcagactcgggctcacaacgggcggtcatggttgcggcaagaagagccaaggaaatataaaggaggctggggaggtgcccgggagtggggcaggcagagatgggtcaggaggggccaagacagctcagcagggtggggctcgggtgtcatcggggtccaccaggccaggctcacggtgggaaccagtggaagacggagaagaggaagcagggtcgcctgggactgccgagggccttcgggtcacagatggtcctttctaaagagtaggagtcatcagaactctctggaagcagctaccacagatcccacagcaggaagaatcttctggaagttggagccctcttgaggctgtcacaaagccggccgggtctcctcacaacctcacagatcctaaaatcccccccgtgggacggtctcctcccaggctgccctgacctgctccagggagcgtcggggagccatagggagtgtcggggagccaggagcagcacagccttccctgtagcacactctcagctggccccagaactgttcggggttcacacaggaacgagccctctttccagctcagcgtggtctcgggatttgaagacaccacagcgtgcatcattatgtaggggcaaatcagcccctcctggctgctctccagggagcagagagaaggaccctggcatgtgagaagctgctaccccaccctgccggagtggggcctttctgactgggcaaggcccatcacagccagcctcccctggggagaccagaggcagatgctcaaagtcctccagcccgggggtcgggtggtaaaaggctgctgtccgctcctgactgcatctcggggcccgcgacagtgtgagaagggctgcccgcctctcaagacgggtgtcccattaactgctgtctgtccactgtcattttcctttgacaacttgttgaacacagcagcgtcccacatgagatggacaagctcacattgcccttaattaaacataccccaggaaggtattcttctccgggaatttcctcccagcagggagggagtctctgggctgctggtccctggatgctcggggccgagggatcccggtgagcacgggggagctgggacttggaagcctctgccaagcccttctcaggcccagatcctgcattcgggcagtttgattttcttggggcatcctgagtgccatccatgggtgtcttcctttgtgagaatcttatcctgccttgatttcatgagcatgaaattcatagtgagctcccattgccccccaataaggcccccttggaaacaagcccccacagtggccggggggcaggtgcacagctcagaattgcccacttgaaggtccttttccaaggtgaccacagccacccaggaggaaaaactcaggaagctgaaatgtcaggaccaaaatcctttcaaagaaggagaaggaggaggaaggaaggaggagaaagcagaaaactccaaacatcacaacacgggcccgctgcagctcccacctccagctaaagcagcccggccaaaggcagcacctcctgagccagcccgctacgcacacctcagcccttcatgagttaaaggcagcgccccccgccccccgagccagcccgctacgcacaccttagcccttcatgagttccctcattttgtctgcgggggggaagttcacatgcctcccccgcatcttgttgcacgtggcctctggcgtagaaactgctggatgagatgcaaagtcctgctacgcagcctcagtcctccgagagctccaggtgggtttctggaagggaataggggtcagacccacccaaatccaccccaccgtggccacgacgtggcagtgaatgtgcttgaaaagaagacagagcaaagcttttccttcggcgtgaggtcctgggcggaggtctgtattgtgggtggtttatcggttcttcaggggcccctggttttccatgaagtggcccccaagtcgtcctgcctggcagcctcaccttgacctggtaatttacaaacccaaaagtgcccgacaaggagccacagcctcttgaagcgctcagaggttaacacggtgacacccaccctatctggggcactttctggacaagcccccggaggatggctcctcttccattccaacccaggcctccactgagccgtccacatccaggattcccaccgctcagcccctcacccccggcaacagcctagtaatgaccctgggctcctgcacgtggccccctggtgcaagggcaaaattaaagcaggctggacagcagcatagttatttgctgccgggcagtgacttcctcccccactcagctgcgcgggggacaggcgggccttatggaaaccagaggcagagcaaagctttaattttcatggccgggccaggaggcccagaggcccaacatgggcccgcgcagcctcagccaggtgccccgagcaggacacgttgcttcggaaggaagcagcatgttttcggggaccctgtggtttctgggtgctgctgttcccacctggcgagcgctgccttctgcacgctgccagggctgtgtgtgtacgccgtccctcattccctcgtgcagcctgggaaagccttacccagtgctgggcccctgaagtttcctcccaggggatgcaaaggaagggaaggcaccagggtccccaggagaaaataggtttctctgagccagggacccactcggccagtgggcgagggcagcaacctggagctggcactgtgggttccttttgggtctgttcaggaaagtgggagtcgggtcgcatggccccccgcctggagcttggcagtgcccagggggccttgggtgggcgcagtgaccctgggcgccctgtgccgccgtcctcctctgccacacactcagcctgctgtggcaccaacaaacccctaccaagcacctactgtgtgtcacacgtgtgccagatctggttccccacccctgggctgggggctgtccctgcccctgagggtcaggaagaggaaaggcgcgtgtggctgggtttgggaaggaaggagaggcagtgaggaggggacctcctggccaatacaagtgctccctcccgcctcttcctccttatattgggcaggcccacaccccaaagccccactgtattccaccacaggacctgaaagagctctggaccatggggtgatccatggggttggtggtgcccccagagtcagccaacagacaaggagagggaatactgggggctctgtgctaggcagccagcggccctgaatgttagctgcaggcagaggtgtcaggccctgaagctgccactgcacacacaggtcataaatcccgcctaagtggctcccgtcacctcgccgcggcctcgtttccattctgcagcagccaaaggtgattaatgagaattatcatttgtgctaatcagagccgtttggaggaggttggggtggaaggaaatgccctttgtggggctgcagggacgactttgaaggctgtcagctgcacgtgtttatgtgcgcagggatgcacgtgcacacacatgcacacatacacacacgcacacatgcacacaaacgcacacgcatgcacacatgcacacacacgcacacacgcacacaaacatgcacacatacgcgcacgcacacacacatacacatacatgttcatgccacatacgcacagaactggcctgtggggccagggagggtctgggaagatggcgaagaggtgaggctaagaaataacccttgacctgtggctcaggggggctctagcgccccgatgtgccgacagccggagaacacaggcttcgcacagcttggtccggctggaatgaattctttcctgccactgagcacgaccatgacttaatgcgcttggcggccgctcgcagactagacaggcttggccaaaatcagacccagtgcagcaggactccgggacgcgctgatgtcctgacgggaaggcacgcactctctgtgggttctgccttctcccctcaagtggacggccgtgtcccctgccctgggccctccatgcctgttcgcgctcagtatgccgggacactctcttcccacccatctcccaggctgtgccgaccagggctgtgcagcgggcctcccagcctccgtagcctgctccgggggccagtgtggcttaaagatacaaagtgtccttttattggaaatatcaattcagaaaggggctagtagtaagctgagaatatttggataatcttgacagccctgaggactaaaaaagaccttttgttcccagagagaaaaaggccgtcgcaccaccctgggcttgctggagcagttccagaaaaaactgaggtcggagcagaaaaatgattagggcgtctcgtgaaagatctctactctaggtcaaatgtttattattatttattttatttttttactagaatgtgtggttaacatgctattgcataacatcaggctgtaaccgtgtctgtgaacaccacgtcagtctacccggtctgtagtgcacaaagagaactttgtagcatcccggggagtgagggggctgcacgtgcgtgttttgttttgctaggctttgttttcaggatgctgacgaccggttaaagatggagcaagggccgggcacagtggctcacgcctgtaatcccatcactctgggaggccgaggccggtggatcacctgaggtcaggagttcgagaccagtctggccaacatggtgaaacgtcatctctacgaaaaatacaaaaaattacccgggcgtggtgttggaccactgtaatttcggctcctggggaggctgaggcaggagaatctcttgaacccgggaagcaaaggttgcagcgagccgagatggcaccattgcactccagcctggcctgggcaacaagagcaaagctctgtctcaaaaaaaaaaaaattgatggagcaagcatctttagtgtttgcggctcaagaacataactgccatggggaggtctctgctccatttggacaggaagcgtgtgcgggtttcatggcagacgtgacttgggaggggtcttgtctggcagaggaaagttgaattcaagctctttgctgtggttgagccaggtggggacacccctagatgctacctttcagctgatcccaggcctaacgcacccacagccaaatggcttttggggagtggctggaatgtgacagctgccggcccaacagctctcaaaagtgccgggctcaagcgtccattgtccaaaaacacgtgcggtcctgtggttccctaggttcacaaggagaacttcttccccgctgtagactacgtgtataaatagaacatattggcaagagtggaaggagtgtattttaaagcacttacacttctgaatgtatgttttatactgataagaattaatggagccggtagtgagtacactgattttcagtgttatgattctgttatattttgttttaattaaatgggatatgaaatcgaaaaggcaagcttgtcttcaaaagaaggcatttgaggaagaatcaaactaactctttgtactttaaaaaatcatttaaaagtagttgttgtttagagaggaagactaaacaaaagcaacttaacgtaaaagtaaagtcatcatctgcagagagctggaggaggggacagagatgaagggtttggggaacattctgtacctgacatgccagagggcccaatcccctcaaagagtcagggaaccttctagaaaacagtctatccattcccaacagaggggaggaggtgagggcaacctaccgaaatcatgcatcgctgagaacctgctggtccttccagagccacccgcccgtggctgacgcaggcacctgacattcattaggaggcagtcccgacagatgcttcctcgtggcggacttcccagctcaggagccgcaacacgggccaggctccgacacctctgtctggagagaagtttgcgggggtcttggccaccagaaaagagtgctatgattgagccctgggtggtggagccctggctctggctgggccccgggcaggaagacaccgtaggagactcttctgtatccatggctgttctgagcatctgtgaaggatccagagctccagaaagtcaaaagccaagcaaaggccacgaaccatgcctcaccccaaagacagtgtctcccccaagcccagccgctcccaccctgaggggaaaggggccatctttgcacaaggccctcctcttgagaaagctccaatgcagtcaccagggaggtgtcctggctcaggatagcagacagggacccacccgtaaaccgtgttgtgctgctttaaattcagcaggattttttcttcttttcccatgagtttttattcacatcctggtaacatcaatagaggcagatctgccagaataagtcatctctgcagctccctccagggaggaaagacaatgtgtcctcccatctttgtctttttcaacagaaaaaaaaatagcaatagcaaaatccacaaagaaagatcaggattaaaatgttctgcagcttctatacacccccattcaaattccgggtaatcggccgcatgctgcctcccctcggagaggccgtggggttggcggatgcagttcagaatcatttgtgtcatataagtgcttgtgattagatttttaataaaccattttgattctatttcctgggcttaaatagatgtctgaacgtggctggtgaggacctgaaagggatccaggtaatatcattgtgggggacacactcttaattcctttgatatattttgtcaaaggtgactagctgtaggtacaggctggaactcggggggagcgagcgcgctattgaacttaattggttccatttgtcattcaaaactgactctgcagcacctctgtctgtgaatcacttcctaacttgccgatctggcccatcgtgcccacggtttgggaaggaagccagctttggcttccaagggagatgtcttaagcagagttcacgtccaagggtgggcttagcacacagctcaaagcccatcaccgagcatctgggtggtctctggctgggatgctaccacctgagaagcagatcatccaggaaggagcctgtgtcatccagatatccggcattgcagtttccagcatctccgttcttccacatccgctgggcagctgggtatgaggagaaaggatgggctgattcgttccagttcacgggccctggggcccttctccacacaaccagccggactgtggctgagctccaggctctgctgagaaaaacagaaatcctgggaagtagaatcattataaagaaccatttggaggaaaagcatgtctctctcaattaagccaaaaggaggcccaggccagcatctttttatgcacgcatacctgggcctagtccgggaagaaaccagagttggctatttgcagggcatccaaagacaacattgtctgcaccaagaatcctttgccaatgaccatttttgtatgtcaaagagcagcaagagctgttctttatagggattggcaaggtatttgcttagacttggcctgttgagatttgagctatttgcaagagctgatctcaaaacatcaggcctgatacgaaaggcagtgagtcactgagctcctccagcccggcgtgtcacagggagaagaaagaaggatgggctcggagagactgagtcagctgcagggaaggcactaaatataactgggctggatccatcctggcccttctccatgcaaccagacttttgctaagcacctactatgtgccagggcccaaagggtgctgagatgaacaaacccaccgtggcctctgctttggggagactggccactgtgacactgcacctaggggaaaattgcaaccataacactttccagaggacaatgatctggaaaatgttgcaactctgatttccagagaggcaagtaaccaggaaaaggctttccacatccctcagcagagcccgtgaataagaagggaaaggatttgaaatggagggatgaagacagacccctgggaaacggaggcatagggagtgctggctgacagtctcagtcatctggaggcgccttcattcattcatttgttccccaagcatgcattgagcactcatggtttgcctggctctgggaatcagccagataaaaccttccagccccaccacccaccagaggagaggaagtgacctgcgacgtgatagccatggcccagtgcagtgtccatgctaagaagggcagggactgtgagagtgtctgagaggagcctcaccctgatgtgagggaccagggcaggcttcccaggagaggtgtcctgtgctctgccaccatgacaactcctggaatggtgttcccttgtgtctcaccatacgaagttggggaagccataagtgtctgggcaagttgaggggagggtctgctccccatccatccatccactcatttattaatccatccaccatctattcatccatccgtccacccacccatccatccattaattatccatccacccacccatccaccatccattcatccatccatccatccatgcatccactgaataatccacccattcatccattcaccatccatcgattcatccatttgtccatccacccaccgatccaccatctattcatccatccatccacccacccatccatccattaatttattcatccatccacccacccatccaccatccattcaaccatccatccatccatgcatccactcagtaatccacccattcatccattcaccatccattgattcatccatttgtccatccacccaccgatccaccatctatccatccatccatccatccatccatccacccacccacccatccacccatccatccatccattcgtttattcatccatccaccatccattcatccattcattccacatccatccatccacccatccatccatgcatccattgaatcatccatccattcatccattcaccatccatccattcatccatttgtccatccacccatccattcacccacccatgcatccatccacccattcatccattcatcatccatccatacatccatttatccatccacccacccatccaccatctatccatccatccacccacccatccatccacccactcacccacccatccaccatctatccatccatccacccacccatccatccatccacccacccactcacccatccttccattcatccatccatccatccattcatggaaacattcagtgagccctgactgaacactgatcctgggtgaggccctggaagagcttcagttgctgttggctaccatcatcaattagaggagagtgagcagggcagggcgagccaaggtgcatggcgctggtcctgacagtgtgaaaggagtcaggtggacagccagcacccaccgcccagcccatctgccctttctggctgtgcaaacttgggccaattacttaactcttctgtgcctccattcccttattgacaaatgtggatatgagggtggctacccctgggggagacatgagcatccaatgactcagtggtgagtctcagcacctgtgggcctcagctctgcatagcactggcctctccagagaataagcggatgagaagactctgagctgctcccgctcaaatgtgtctggtcctcctaaggtccatctggaagtcactccctgtgtgcagcctgcacatttgagagggcctgagggtgaccaggccatgagcctctgcacagctcttactgagatcatgcacaaacccctcaggaaccaaccaacggggaagagctgggtgagggaccccaggggtccttggtaggttcctcagcctgtcattcagctgccacacgtgggggcttttctccaacaaaggaaagttctgggcttgccccaaaggccctgcttcccatggctccagggtgcaagccagctattttagggaacccccaccccaagctgcatcagctcagcccatcatgaagaattcctcccgcatctgctgtggggtgccacgtttacaagctctgcagtgtgtcaccatctaagtggccagagaaaggttatgaatgtgacacttcccagggcctcgtgtcacctcacagagaaaccgcttcctgtgggcgacctgggctcccgcctcaccccgggcaaggagttgccacaagcctttggtttggggctgttgggctttttttctttccaatctttgctatgctcaaaaaccaaaccaaaacaaaagtatctcacttgagaatgtcacagccaagtctgcggtaacgtgcaaccttcaggctcagagcctcctcctgctcttgacccaacttaaatcaaattcaggtttgaacaactgttagagctgttaatgtttgaactatggcagcctgctctgggtggagaagctgctgctctggcacagctgccccagatcccaccctcctccagagcctgagtcagggccacggacggggttctgggcccagcctaaggagcagggactggtgtggggcctgctatggggtggggagagggcctgatgcagagcctgcgggctcggggaatgacttaccagctagcggggtttgggggattttgcaccaatggccttcaccagtccaaattgcccagatgttgttatatcagcagcttgggcatcaaactctcaccgccgcaggaccagacatggatgcttccacctcgtaaggagcaggacacccagtggggcggggctgagctcaggcacacacaagagtctcctcagagctggggtttcttgggagcacgggggttaggggagccggcttctgcatgcgagctccacgggacagtctcagtccccctgctgcagtgccggcgggaaacggcaacaatgccagagcattcacacccagagtctccttagagcccctagattccttgaggtcggaaatcgccatgccctggagagacagtgagagccccgccccagcgtgcctttgcggtgacccacatctgggcaagtagacactgtggagactccagacacctcctcggggagccagggggttcggggggaagtcccaggccgtcgttgcagacgtttctcagcaggttcaggctcagcgcccccacatccttgctttgacctagtcatctacgcagccatggaaatccgtctctgtgcttatgaaaaacacccctgcaaggccacagaaccaggcctggtcaacctggcgtgacagacttgatccacccctggggtccctccctgcaggcaggacagacgcgggacctggagcttctctcctgggggtgctgggcaagcggggctggggcatcagttctagcagcctggccccgtgtggcaaacccactccagcctgcacctccgtgagaaaaacagcagggattgcagccaggaaggagcccagccaacgcgtgctgccctccctgccatccccacggggacacatggccgagcctgggacgtcctgccagaaagcatccacaggaagaagacagagcagggaacagaccctgtcctggctgctggtgttgaccagagccaaccaaagccaaccagagccaaccacgctgcttccatttggagctctgggtggagcttggcctgcttcggtgtcctcctggaggcttgctgagtgggaaagtgactgccactttggatggaggtccccataccctcctggagggagtgtggtatatcggccagcacgaggcaaacctctcaggagggccagggctggatcccggggtcccagccgctgaccgccaggggccagggccggcttttcatgttgctgctgcttccacccctgccccgaaaccagcacatcctcatcaacacaagacccttctctgccctgctctggggtccccagatcaaagccagcagagccaggcaacggcacccagggcgcccccttggcaaagagctttccacttgaccataatgcgggatccctttaaaaatgacacatctgtaagctgggatccccgttacagaaatacagtttatacacaacttttcagaggcgaaacatacctaagctactcccaacacgtatggcagagacggaggctccctggacacacgtgtccccagaggaaggtccaaggactcccccaccggccccgcacagcagccacctagcagctggcctgggtctgtgaggagggcccctgatgctcagccaagggccctctgtgcgactgtggcctttctcctgggggccgctgtgcacatctgagaccctccggaagggggagggggagctctgcaagcggaggcagaggcattctctaaggcagagcgcacagcatagcctgttcactgggtgcccctctcctactcactgcaagggctggttcgtcccttcgggggtcctgaggacctcactaaaggcttccagagggccagaggtgcttgtacttcttgactatccggaagacccaggtacggccccattctaaagagcaggtgagcaggagcagccaggcgggggagcagcaggcacccaagccaccagtggcccgaagtggccgccacaggcacacagcagagaaccttcggtgtccgggcagggctgagcacaggggtcctccaggacatcttcagcaggtgccaaaggccagctcccagttcctcagagcccaccccgcctgcatgtagccacagcctccaagcagctggaaagcagaaaagaggctttctagctccaaaggggggacaccgaggcaggaccccagacaacccccacactgtcacgatgaggatggtgggagatcggggctgggagggcctgtgtgactcagaggtcagtctctgaagcaccctagagggaggggcccaagccctgctggtactccccccaggacatggtgctccccactgtgtccacccaccggctgccgagcccaaggtttcgacagaccctgctctttccacgcactgccaatcacctctaggcgttctgtgtttcatgagcctgtatctcaacccttcatttcactaaagatgcaagaacctgggtctgagtcaccagtgtgctcctttatttctgacggtcagggctgcagcccatggctcacaagccaaacctcagaggtgccacgaaggacgagccacatgccagagaggaagcccagcccccaacacccccaggctgctgggagagcagtgacggggccgagtttggggacataccaggagcacgccatgtgcaggttgcaggaaggggcagggaccactcctgtggcagggggcacagcacagcctcaaggcccgggcttgtgtggcccctgtcctccactggtgtgagatcaggatgcataagtcccaccccaggggaccttgagaagcttgggcactgcgcacggtcagatggaaactcctctttgcttccctgtctcaaccaaagttttcttcaatgttcatagacgctgctgggaggtcgctccccacccaagtgaagaccctgcccaaagaataaagaaaataggaataggaaggaaggggaggagggaacgaaggagagagagagaactaaggggaaactccacagcagagatggcagaactccggaacctgggctgtgggctggctgccgagggctgtgcgctccctcagagctccacggcatctggggtccaggtgctttgggggagatggtcagtgcaccccaggagcgccacagcatcccggtgtcttggtgtttagggggagatgatctgtgagcctccatgtttgcagggcatctgggtgactggagcttttgaagggagagggtctgtgacccctgggggcttccacatggcatttggggtgtctccgtgatttctggtctgtggcttttactagattttcgaaggtgtctgtggccccaagaggctacaaagtgtggaatttggtgactctttttctagcgcgttgcattcctcagatctgcccagcactgacacaaaagcagagccccccaggcgtggactccacgtgtcccgggccttcttctgccctcagagtcccactgggtcacagggtcctcttgctgcatctgaattctgggccatgctcttggggctgtctgagaccctgggaccctggccctcatctctcccccagcacgccccactgcctgagaaccatccagtgagaccacagtcaggcgggagctaagagccacagccccctccagcttcttccagagacaagccccagacagcccacccttgctctctgtctctctctgcgagtttaggagagaggctggcttccatcttggaggaatggctgccaagagttgcctgtttctccaagcagcagcctctctctctctctctcccctcactcttcccccaccccaaccctcccatcctccttcgtttcctctcctcccacctccctctcagcctaagcaggtgggccccaggcttgctgaccgccgaccaggcctcctgtgtccctggccgtggtgtggccccatcccaccagccacatttctcattagcactgggtcccatcaccacccagccccctattgggcatcaggatggggatttatgagctcacctaggctctgtgttcacaccggaccgaggtgtttccagaacgcctttcccccacctccttccatcacaagaatgggctttctgtttcggctactcgtggacaccatcaattgtgaccattgtgtgtgcgcacgtgtgcgcatgtgcctatgacagccccatagccagggcttcttactctgaatcagctcatgggtccttaaagaagggggtcagggtaaggagaccctctcccccggctcccgccagctcctggctgtcagaggtggactccatggccatgggcttctggggagcctcctggcagcagcaggagacgggaccgagagggcagcgtcccagggctcctctcctccctgcatgctcagaatccactaggcaagctgatgatggatgctgcggcgttcccacctgcacgcacaccctggacggggccggcggctggccatgcccactgaacctggaggaccagcccagaagagagcccacaaattagaagtgcaggaaacctcaaattatatgcaaaaaatgtaaaggttaagagaaattttcccccacttcacttggtaactcagcatttctgatggggttgatttatgagctgggggagctgcccggcgccggggagtgggagacagtggacaggagggcagtttcctttggaggtcctaggactcctgaggctcacccccaaacaactcaaagccaggcgtttaagcagcgatcaggcagggaactggattccagatctggagagagacacagcccagtggccatggtggcctccagatcactacctgctaaagccggccgtgtggagacgtgggctgggccgctccttccctctgtggctccctcctgtgttcattgatcacgcgcaaacagaagcgagcagtgagcccgggttggtcacttgcatgcatctgttcgttcgtctacccacttcttatctgtactggcctcctatgtcacggagaacatcccaggcctcaggcctgccccgagagactcccagagggccttggaggtgtcagggctagaagacttcacaccaaaacaggcccggctcccagacgtggctggatgtagcacgcacccaggttggaaaggctgggctcgcgccctagggcaggcggagacatcgcctttggcacagatccttggcgctgtccccacctggtacagtaaggagcctgtgttcaggtgcacatggctgcgaccttggacaccacctccctgagtgttcctgttgccagtgtttcttccaccgatccctgatttccaggagcatccagagcccagggaggccctggtcagatgcaacttgggcagccggagggccaccaagctggggagtggtggcctctctctgtccttgtgggtgctggcaagtctcatgccaagggaagcagggaccgggacctgggactgcccaggcctgctttgtggattccagaggacgtgaaatcttgtggctcccagaacagggctcggggaccctccctctggtccttgagtcggccctggagagcacacggggcagccatggcacagctctggagtccggcagcctgggctgggagctggccctgtctccaggggcctccatctcctcttctacaaaatgtaccatggggcagcaacaccgtacccacctcataggcccgcggcgatgagcgaggggcctcgacagcaccctgcatggccctgagtgcacagagaccctggggaggaaggcgagagaggacaggaaaggtggcaggaggaggcagcggtcagggcagcacctgccctttctggaatcagagacagtacaggcccaagaagccaggcctgagcctccacctgcctggccagaaccacggcccagggccacttcaggagcatttctctgatctgagacagaaaagcagtggcttctgaagttctgtccaagctcctcctccatctgctccctccttcaggagttcccagatgggtccagcaggaccccagcagggctggaccctccatgctgggacaggcagccagatgtggtcaggcatctcaggggagaccccacacctgactgtgatagcagacacaggcctggcccctcccagcgcgcccttcctggtgcaccctccccaacacaccccctcccggtgcacccctcccggtgcacccccccaactcacccctcccaacacacccctcccagcacacccctcccagcacacccctcccaaaacacccctcccaacacacccctcccagcacacctctcccagcacacccctcccaacacactcatcccaacacagtcctcccagcacacccctcccaacacacccctcccaacacacccctcccagcacacccctcccaacacacccctcccagcacacccctcccagcacacctctcccaacacacccctcccagcacacccctcccaacacacccctcccagcacacccctcccagcacacccctcccaacacacccctcccagcacacccctcccaacacacccctcccaacacactcatcccaacacagccctcccagcacacccctcccagcacacccatcccaacacagtcctcccagcacacccctcccaacacacccctcccagcacacccctcccaacacacccctcccagcacacccctcccagcacacccctcccagcacacccctcccaacacactcatcccaacacagccctcccagcacacccctcccagcacacccatcccaacacagtcctcccagcacacccctcccaacacacccatcccaacacagtcctcccagcacacccctcccaacacacccctcccaacacacccctcccagcacacccctcccagcacacccctcccaacacacccctcccaacacagccctcccagcacacccctcccagcacacccctcccaacacacccctcccagcacacccctcccaacacacccctcccagcacacccctcccagcacacccctcccaacacacccctcccaacacacccctcccaacacactcatcccaacacagccctcccagcacacccctcccagtgcaatccctcaccatgcacccctcccaacacattcatcccaacacagccctcccaacacacccctcctggcgcaccccctcccaacacatcccctccccgtgcaccctctcctaacatgcccctcccggtgcatgcccttccggcacacccttctcagcgcactcattgctggttcagggccctcagaccagggcttctcctggctctcctggaggaagggttagcgcccacctggcccccctcagaggtgcccctctgtggaaggaaggagttaaccaagacctcctcagtcaccccagggggcccaccaggcagaggggaagctcctccctttaggggccaccaggtgtaactcccaccctgtgactattaaattggtcaggggttggggacccggcctccggggacaaggagaaatggctgggaaatgagagtgacaagggaggagaggctgtcaggccagagaggggaccccacccgcagggcagcaaagcctgagcgtgtactcgggaccaggacccctgggggagttgttgcctctggtctccaggcctctgcacccgagagggtcggggacagaccggaggctcaagaacactgtcccatgtgggtgagaaaccagccgtgtccctgttcagacacgcttgagagagccagagatgtttaccctggcaggggagggttagtactcaggccgcacgcaaatacctgcagggccatcatgtggaaaagagaggcttattctgcaaggtgaggggggcattacaagaagggagagcctatcccccaagaaacaattcccagtgactcgatgcattcaacaatacactggctgcctaggagcacaatgggtgcctcctccacagagcacagtgatatgggcctggagactggctgtcccagtgcacaggtgggtccctagacctgcagccatcagtggccggatcacaggcattgaggaggcctcagatgtgaggttggatggaaggggccagggttctcctccaggagctctgccatgacacagaatccacatttctgagagggaattggccatcgcttcaatgtcctcctgctggcttcggccttctgctcaccaaaggcttctcgccgcgttcccccaggacaagcacacatacatgaacgcacacacatacatacatgcacaggtgcacccacacacatgcacaccccccacatacatttgcaccatgcaggaacacgcccacacacaagcacacacccagatacatgcacgcctggatggcgaggggcttggaagcacttaaaatagtgggacacggattgtttttccagggatttattggggagagccccaaggcctggaagtcaagatgaagccaatactcttgtttttttctggttttttttttttttttttgagacagagtctctcactctgtctcccaggctggagtgcagtggcgcaatctcggctcactatagcctcttcctcccaggtacaagcaattcttgtgcctcagcctcccaagtagctgcataccaccacacccagctaacttttgtatttttagtagagacggggtttccccatgttggccagcctggtcttgaactcctgacctcaggtgatccacccgcctcactctcaaagtgctgggattataggcatgagccaccgtgcccgacagaggccaacactcttgagtcaacaaccaggccccaggagaaccccatgccatggctgtggtcactcacgcgtcatttaccttctccctggcccctgtaccatatatgaagagagagagcccaaaagagacgcatgctgagagggagagatacagagacagacagagagaagcagagcaggggagacagagaggaagaacctggcacccaggccaccacctgtacaggggctgtgagtcccctgccccacagtgacctccaacccagacccggccagtggtgagggagggggggcctcgtgggtcttggccagcccagcctcgctcccttcctgtggcagaggaagatggcagggctgccgaccacagctctggcttggcgggcctttccagcggtttcctgctgcgcatcagcagtcagggtgggaggtgagggggccctaagaggcctttgtgcctggggaggggcctcaccacgtggggctggtggccctgggtctgcaccctagaggatgggaagcctgcctccctagtgacaaccagccgcttgtggcctcctccctcccatgccacgcccctgccacccctgtcctggcaagagatggggtgcaatggggcgggctgctgagtctgtggttcttggattgggctggccctggacttgggcagggcaggcagtgacctccctggacagcgtgaggacccttcctgcagcccctttagggaccaggacctcaaatgtcaagggatttgcagtcctgcctggggcacagctgtgtctgcagaagctggtaacacagaggctgtctccctgggaacctgccctgagtcctgaacagcagggtggccacagactccccaccaaagcgaggcttgagccagccggggcccagaacagggggaaggtgttggctgagcccatgtcttgggtgcattaggggtgagtcctgcctcttgggaagtggcctgagccccatcagctggtccctgggctgagggggatgcactcaggagcacgtactcctggctgcaccaatggggtgctgtgacccaggtgctccagctttgaagacaaaaatccgggtcccaggtgggagggcacggcccgccctgggtgagcaccagccctcagcccacaggcactgtgtacaatgtgctgtgacgtcagcaggcctctatggagaagtggacccatgggctggggacgggactgggatactgccagccccatgtggccagctgtgctcctgctactccatcgtttgtatattgagcatccccccgccgccaatgttttcctcgggctccagcccctagcctagttatgcttcttggacccacgtcccctgtggaccacaggcccacctacagttccgagtggacagaattcacggccaaccctgggcagagaagggacctggccattcagtcacagtcacttggtgaatggagcagagcagccacagcccacgagcttgggagcatttctgccgctgccgtctctgaaataagacaggctttgagtgaatctcccactgccctggatggagccagaaggggcccaggggcaggcacggctgtgtgtgatagggagcacagggaccccaggagcacgcccctctatcctggctgacctcccgccctgcaccccaatctatctcacccagcacctctggaaacccttagtcgggaaccccagcttggtggtggatgtcaacaaggagactgagagcaagtggaacaggaaagagactcgaggccctctgcctgtctctgctgtgctctgggggccaactttccctggaagcctcaggggaagagggaacaccatgcacagagaccggggcacgtggaccacatgcttccccattgattggtgccgacgtttaacttttcaaaagaattccagcaccaggcccgagatggctaggaacccaggagagtgcatgcccagcatctgagggtcagccagcaccaggcccgaaatggctaggaacccgggagagtgcatgccgagcatctgaggtgcccagagtcagcctccactgttttcacttggacaggtcactgtctcatcctgactcccctgggtccttgtgactcccttatccatcacccctgcccgcccagacacacctgctcaaagacacacctgcctaaggacacacctgcccaccaggacacacctgcagaaggacacacctgcccaccaggacacacctgcagaaggacacacctgcccaaggacacacttgcccaccaggacacacctgcccaaggacacacttgcccaaggacacacctgtccaggaacacacctgcccacccagatacacctgctcaaggacacgcctgcccacaaggacacatatgcccaccgtgacccacctgcctgccaggacacacccacccaaggacacagctgcccacccacatacacctgtccagcaggacacacctgcccacccatatgcacctgtccagcaggacacacctgcccaagggcactcctgcccacagagacatagcctttctactttagggacctgagtgtagcgtggccccatcccctgccccctgccctccctcctgccctgtctgggctgggctgcccaggaagcttgcccaagatgctgctggtttgaattcagaacccagagtagctactggccagagtgggggaggctggggggcctgcagccgccacccatggtcaggctgtttgaggggacaccgtctctccacagtggacagcaggtcaggtctcctcatcggtggtcctcggaggagtgggggtcacagcaaataagaaaagtcctaggggttgccactctgcccgttcagaggcaacagtgacaacaaagcaaagccaagttggttcgcgtgtgactttgcgggcgtggtgagaacagctaggcgtcttcatgctgctgggtgtcaaactgaaactctccagctttaaggaaaccagatgcttttcttgctctcagagtgatgtgcaggctgccctgagcatgcacacacacatgcacacccagcaacaccttcaccttcagacacgcttttctctagcgcagcgtcccagctccttagcagagggctctgctcccagatgcagcagtccctgccttctcacacgtgggtcagctttgctgcgggggtgggggttgcaactctggaggctcattttatcgccgggccagggcagtgatctgctcggtgagaaaagaaaaggccattccctgcctttctgctgggctcctggagactcctggagactcccgggcatgggcaggctgggtgggctgggagccccgctgatgcccggagggtgggctgaggtctggacgccgacttgccttcctacttgagcccaaacagccaggtttctgggtgggcagaggctgtgtgcagactccagcacacagggcacctctgactcccgcttcgctttcctcccagcagatctccgaagacctgggcagtgagaagttctgcgtggatgcaaatcaggcgggggctggcagctggctcaagtacatccgtgtggcgtgctcctgcgatgaccagaacctcaccatgtgtcagatcagtgagcaggtaggtccgggctcataacaggggcttctgcctcttggaattgtccctgaggatgtggcaccaagattggtggaggtgccgaggcaagggttgtctgagcctctttggggacatctgccaagccctggcctgcagtgggggtgctgtttggtgcttggccagcactggcttccggggagctgactcaccccgggagggctccattggagccttgctcagggaccctgcctgaggctggcagttcctgaaccccgagatggtggttcaggtggaaaagagcaatgaagcaggcaggaccgcggatcacagggtccacacttcctgcaaatgccgcttccctgaaggacacgggagaagcatagagcaggaacagtcactgaaagaatccatctaaatggcgctgtttcaccaaattttccgaagagtccgcaccggccaatgaggcagccactcggggggcctcctagagcctccggggcctctgaccagcctgctgaaggccttggcctttttggcacaaagtccctgtcctgcaggcagcgaaccaggcaagagataccttcacttccgtccctgccacctcggggctgaggagccccctaagctccctggatccttgacctccacggctggtccacaccaccaccagaacaggcatccagacccacaggctgatcaggggagaagacgcggagtctccttccactccagaaggcaccgtgtccccagagctggtcgctgcttcatggatttctctatttcaagcttgcgagtggcccctggaggcccttctcactctcaagccaggcctcccgggcggcactttccgcctgcatcctgaacaccgtgcgttcctcggggtgcccggggtgcccggggtccccggccccttacatcacagtagtctggtttttcctgtaatatcttggggtcatacatgagatttcatttgaaaaaaaagaaaaggatcccatggctgtgaaaaatgtgtgtgaagaccacgtcacggaacattcccgcgtagcctgtgcaagccattgaaagtgattcaaggctctcgactttacagaaacaattttgcattaagaaatgcacagagcaaactccagggaggtcccgcaggccccggctggctgccaggggctctccctcatttgccgtccccttggctgtggagcagaatctccatcgagcagttgctccgctggacaagctcgttctggatggggacatgaatctacgctactaccaggacttccgtggccttcagttagagccaaaaatgtttaaaataactttttctgattgaaaaaaaaatacagagatgaagcaaaagaataatcataaacataagagcagaacttaaaaaaatttttttctttcttccagatgaaagtgaaattggagtgaaggaaaattgggcttgaggcgcatagaaggacggtctttccgtccccttctggggctcagatttgcagagtgtgtccttagtcgtccgttgggaagctgacgggcaggggcaccgcggggctgggccagggctgtgcttttgtgagatgcaaactatagtaatgaagggcccagattttttttatttaagaaataaatgtttattagaacttttgaactaaacttaagcggtaaagtgggtatctttatgtgtctagctttttaaaaaacaaacgtgtaatctcaaagagaagcctgtctttaaaaaaatcttcattgtattattaatatttcggggaagctttccttttagctacacatgaggtccaaaaggaatggactgctttgcagccaactgtgtttccatggtcaggaccagggggcagaaatcctttttgccaggatggaagaatgatcctgaatcctgatccgttccttccctttaccccaccgtcatcccacagtgccgacttcctccaaagctccgtcctagagtcagaaacatacttggcgctattacccaaaccacagataatgtcaaaactcctcagatacctcctgacctgctagatggctctctccaacaccgcctcaagggattcgttctctctgttttaggtccataggctgaattaaagccacaaacccagagggaactcgaaatgcacatttaagcaaatgcaacaccaaaatggcccaaagcagagagaaattcctccactcggggcacttccgaccccctcaacccccttgtgagaccttcccctccgacagggagaggagccctctgctcttgagagcacccctcataggtagcacagccggtgacgtcgggtgttacagggccaccgacgctcctgcccatgtccccgcaaaggtgcacctccgagctggataagccatgtggctggaatgcccgggaaagcaggagccggccagaggctggaggagactcgccgcccaggcacggggagtgaggtggctgagttggcagcttcttctcctgaaatctcaaccgtgaatttcagttatcaaacgaaaatgagcattgtgtggaatgtattttcctttgaataataataagatttaaacactacaaatatgaaaaactgctctcagaaacccatagactctcataggacatgacttttagcaatgccttttgaaagggatataatagatttcaatctagtgtttaaatgccctctcgcgcgctgtgacggctgtgacggccgcacggcctcggcagaaagcatttccattccctggccttgaccacgggaacgtgggttcctgcaaagcaacctatttgaccctatgcggagctaaaataaaaactgccctgaaatattaataaagccaagaattttttaaaagcttttaacaacttctctttgagaaggaaacatcacatgatactaatgccatttctcagatttccaccatgccaggagttccaccaggatttcctggtacttacgaacaccatccccacacacaaacacacacaagtgaacaatcttcctcccttcccctctctctctccctctctctttctctgtctctctctttctctgtctctctctttcaagattgcacacacacccccacctctaatacagcacagacacagaagggaaggaaccatatctgaacatccgagctccgtaaaacaacgtcgagtttgccaaatggtattcggcagggaaaatacttcggtcagaaaagcatcaccatcattttgaggttcaagacatgtgacctcagcccccattttcaaaggaaaaaggagactagggcagaagacagtgtaaacgtcctaaaaagaaagttctggaagccacagcctcccagaagagatgagctcctctactgggctgaggagagaggccgctctgaactgaaaactcaggtcgatattcagatggggacccaggctggggctttccccgagtctcctgctactggcagccaggacttaagcaaactctggggcctggcctccagggtgctcctatgtccttggggtgagacccacactttaggggcactttggaggcgggggagtcacacacctccttcagcccatcccgggctcctcctggccttcactggatgtgggttgctgtgcattcagatggggtctgggggcagacgccacccccgcatccctcatggttccatgcagtgtactggcgctctagctgatgctttggggcgctccagggcacctgctgagctgggcagtgcagcacccacaggcccggttctgactgtctggccaggacccaattctggctgctcagaagcctgctcaaatcactgaccacgtgtccctctcccagcatcccctaacacgccccaagacacctgccctgtacaaaagaggaccggccatgtgctcctctgcagccactggggagaggcaggggacaggggcttgagaacatgtgagccccggagcttgaaaaggctcagcaaccagccagcacctccccagaggctccccactgccctgccgcctcgcagtgcctcatggacggaggcaggaccggctaagctgagggaggcatggaggccccgacaccctccttcccaggcagggctggcccagcatcctgttccttccccatctcaggccccatgggaatcggaccgtcctctccatgaacaagagctatccctatggcgtggggctgagggggctgcttgtgggccccacctccacgttctcatctggcaatgagattccccctcctggccccaggggacctcttgagaggtgaccgggcccatcccagccctcctcatggctcatgggagagccgagcagagccagaggccacattgggccatgaatttgttcctgggcccggccctgttgcccaaaaggggacttgtggttttctatttgcacaaggaggccccagatcacggccaagggcacactggccccttccgaggccaagggtcccgctgctcctgaagcggcgcaggctctctggggagctgctgggagcaaaacatccctgcacacagctgcggggaccgagcctttcccctgggactttcggggcaatcagattgcaagggagatagggctctgaggtgtcagaagtcgtcgtgggggactttgacttgctgcctcgtccgagcatgagcggaaggcacagaggggccctcgggaatctccatgcacttttctgggggtgcgccccccccccccccccaccctctggctcctactttcccttttggaaaattcaagacactcagatcacccctgggtggttctttctcctgtaattatgaacaaatgagctggtttgaaatgtttcaggagacacagacagggacagttcctgaatttgttttaacgtgaagaaagaaaacaagagcttggcgatgaagcgcctgcggggggatgcgggaggcagggaggagctgtcacagccggcgctttctgttttttggtttatctttttctcatgttgcctcaatagggcaagaatgttggtggtgggatgtcaactgtctagtggggctgaagatggctggggacagggctgaggtcaaacacaaatgtcggggagctggactcaggggtgcgggccccccagcgtaccacggaacggctgtagggctctcaaacgacctgtagcacccctggattgagagaagcagccccaatctgcatagcgccctggggctgcctgggcatcagacaaaccccaaaaccccagggccttccaggggcagagcaggggtcccggcgcccgccgtggagcagcacagcccctccacagagtgttccgcgcaggcattgtgttagaagagtggccgccggtggccaggcagcaccgcgtggacaagagcccgcgcgggttgttcatgagaaccaggtgtctctcgggtcggcggagggcatttctcttttgctttgctgtcctgggctctgacccgggtcccgcgtttctgtctgggcgtgtgccctgtcagggttgcggttttaaacagagggcatccaacacccatcatcttgttctgccccgaccccagacatgttcatattccctttgcttttatctctcacagtgtgtttttttttttttttttttagacagagtttcactcttgttgcccaggccagagtgcaatagcacaatctcggctcactgcaacctccgcctcccgggttcaagcgattctcctgtctcagcctctcaagtagctgggattacaggggcctgccactatgcctggcttattttgtattttttagtagagacagggtttcaccatgttggtcaggctggtttcaagctcctgaccttgggtgatctgcccgcctcggcctccagaagtgctgggatgacaggcgtgagccaccgcccgagccatcctcacaatttttttaaattaaaaatcatagattgttaatttggttaaggcaggcaggagcctcccaccatgcgacacagtttacccccttgaaatgggcgggaggagggcagggggctccttcggtatttcataaccagcttacaaaagactccaaaatacatgcaggttgctttgattcccattttacggggccccctttggaacaaactgatcctcttcttggtgaagaacaaggtttaaattcaactgtgccgtctgaaccgctacgcaaaccacctgtcaggatttgtatattcctttcctgctcgttacaggctcactttactagacgaagctatttaagaatgatcaaggtaatttaactgtggactcgtcatttatatttttataatccagatccaaaccacacaactaagaaacagataagtgtgcacagagttttatttcatgtctgggtcgctgggatggtgacggcatatcgcacaccacacaataataaaacttaggcttaataaaaatgcttcagctatgtgcaggacaagaggaaggtggcgaagcccgggactccagcgggcttttcctcgctctgccagaggataggactgtctatagtctgggagcctgactgtggtctcctccagccgctcagcacggaggaagccggaaattgaggccggccagaggcaggctcccaagcacaggcgtgcacagggtagggagaaaggagacccctgcccaaaccccagcgctgcaaatcggggtgctgcccctgctggcgcttagggcatcatcactacgacatgctcagctcctgggccggcctcggggctcggggatcatcacagcgctttcccacactcacagcgtgtggagacagcaaggagttaaaatgaagccgggagcagcactgagacccagccacctccgctaaaaccaaaatgcaggggacgatcctcagcccaacatcctctctctctcccaaggccaggtgagaggcagaccgggtcaccaggggaatctgcttttgggaaatggtttcaaagaattccgattccactggctgctttcacgtgttttgtgagaaaagcctcttgcacagtaaactcaggcacagttgaattctgaaatccagaatggtgagcgattgagttttttccagtaagcacacggaaggagggttcacctacttgattcaagcctgcctttaaagtttattacgctggtcaaaaagagacaagaaagcccaaaagttcgcttgatggaaaaaattcatttattccaggaaagagaaaacaagaacggccgctgctcagattcaacccagttccttttagtctgcagtccggtgattcccacctggtggaatttgcatggagtttttcgtctatttgtattgttaaattctatgattaagcgggaatgagaaccgtaccactaagagcttcatattcgaaagtcgtctcttttcttgtgaattgatttgatattttaaaaactttctttaaagacctgtaaggagaaggtatcccaaagctggcagccattgtaaatgtaaatgatttctgtgtcttaaagaatattgctgggagcaatgatactaattttcataaaaggctctgtctgaatgaacgtggcctgggctgactctaggctcttctcgggcaatttctctgccttctgttgagaacgtggccatttatttgtcccagaagtccacttacctacaagaagccgcctctttgtgtctggaaagtgataaaagggggagaaaataggcagggtcatgctaaatacagtttgaattcggaggacctgtgtttcgtgttgttcacccacgttcagtcaagtcattgttgttacaaagagaacctgaagtgttggaacaaggacttaacttcagatccagtctgtttggcatcattatttttttaaagccatttacagcagacatttattggcgctagtaaactcagctgttgttaagagggttccccaccctctcagatccttaaaccaaagggaaaattccagccttgcccgtgcaacacaacccggggacttaggcacgacttcaacagcatagcggaggcgagtgtttataaaaaggcatagatgcctagatgctgtcgcttaagcaaatatactgttcttcttcctttccggcggccagtcgtcctccctgaggccgctgctgggggctaaaggctatcagagactccagactttatttttgcttcaacagacttctcccaccatgctgacttagcgcggtctgagcaggacccaccgcgggtctcacgaggaaaggaggattataagcagacggcaggaatgtgtagggagctgcagtcataatttatgacaagccctgcaggaaggggtctgcagtacagtaaatgcgcaatttgtgacgctctcgagccaggagccggcgcaggctgggtccgcagacgcccggttcccaccgcggccggcccggtctttgtcccgggaagtcgcctgaccccgccggccaggaacagtggcgttctcggcgcgtctggctgataaggcctttgtgacaccggggacaggctgtaaaaacgcagccagcttttgtctgcacctccgcgccgctggcaagggcggggccggcgagtgtggaaaagtttgcgcggattcccgttcacctctgacccccgaagcagttggaggcaggtcggggacccccgcccccgccccgccccgcctcgggccctgcgatcagcagtaatagcgattaattccgactgtggctccaagtcccatggccaaggcgccctcctcctgcaggtccagggccagggagggggagcccgcggcccggcgcgctagaccctcccgcggcggcggcggctccagggcagtgtccgcgccggaggggagggtcccccggcaagtctgctgccctcggagccggggtggggtcccaggagacaccgggggccctcggattgggggaagaggtgggggaaggggtttccttccgcagcgccgcggatcagaggagggaggcctggcgccctcggagctgcggtggggggcatcccaggagatctggctcggtgtgtagagaagggagtccgggcggcgtcctgggagtgtctgtggcctgcagagaggggatggggttggggtgtggatcccgggaggctcggaggcgctcggaggctctcggagggggccaggcggaggatccaggagggccgcccagcccccgtccgcccacccagccctctgcccgccagtggagcggagccgagaagcagggagtgcgggaggatgcccgaggtctcacgtcaggaccctcgacgggggtggggtggagagggaggtggtgggtggggtgggtggtgcggcctggagtggagccaaggggcgggcggccagggtccacattgccctctaacgggacccctcgagaagcctcagcctcgcccgctgaccctcctctctcctgcccagggcccgggccaggccacctgccccacgggcatcagccaggccgggcagtcactcagcagccccttccacttgcgcctgctacaatgccactcacggcaccgctcagagggtcacccgggctttgtcccagctggcgcttctcatcccgcactttgggcccgattttctaatacagtggctcaagtttcttttttaaaaaagagacaatgattcagccactgtgtgatttttttttttgataagatgatacaaaactggggtcctaataataatgggtttaattgaagaagttaccatgggccagtttctcctctccacttttacatctcctcataattttagcaacttacctgacgccccataagggaacttcacacactactgacagaggccgtgcacctgcctgtcctccttcgtgcagttcctgtctgggtgtcttgggagtagcagacactgggcattaccgtcacgctgtgacttatgtgtgtcttttgagagttccttggtgtcattctggagtcagttgggactggcagattgtagtgaaattcacaatgtgggggacatgggggaggagcatgcaggggccacacccagccctgtctcgggggtgcccagctgtgtccagccacagaccccagccaggtccaggtgctggagagcctggcctgacacaggatggtcagtggggatgggagtgtcacccacaaggatggccacgtcccctcaatccctgggagcccttccctttctgagtctagacccactctgttttcttggaggagcctcagccccaggtctcgcaggggcaggtggatttcccttgggcctctccccagcctcacagccagtcctccggccaggcctgcagttccctggaagctccccagttactgtgatcagaagagagtctcaaacacccacatgtgcagggtgggcagtgactcccccaagagaaacacacctgccgccagacactcccggaccgaagacacagggttccttgtgctggcggcatggcccgtgccctggcccaggcctcagatggcctggcctcccctttgtgaactgctaattttcttcatctcgaccaccacttccacaccccaagacaacctcctcttttcaggaggcccctggcaagctgcagtgacacagcccccaacagcactgctcagtgagcagagttccaaatggaggtcccctcgcccccagggcttgaccaggctgcagaatctacctgagcccaccagttctcaagggtgtcctccatcccagactcccgcctgtggggtcagcagcaaggcgccaagctgacagtgggcacacagtcctgcccgccccagccttcctggctcatggcatccccgctcctgggagaaccgcagccccatgtcctgactcactggccaggcgcagctcatggccactttcagaaacaaccagattcactccacaccctgagctccccctcccccgccgccactggcaaagcgggtctcacttacatacacaaaatggaacaaaagaaacttgagaacccacccaggtgggctcttggtggaagcggggctctgctgtgcccccaggacacccccagctgggaactttcatgtggatcctacctgtttagtcggccaccccctttatgaatatcctaaaacccaataaagcaaattaaaaggggacgcaattccttctgcgcatactctgcaaaagttccatagtggaccctcttggtggcaattagaggaaaatcaagtgcaggccgagctgcgtccacagtgtgagggctgagtgtgcactgagaggctctccagacaccaacaaaccacactcaccctttctctctggtctctccatcctagatttactataaagtcattaaggacattgagccaggtgaggagctgctggtgcacgtgaaggaaggcgtctaccccctgggcacagtgccgcccggcctggacggtaagacccctcccccaaaccgggccacggcccctgggagcccccagccagcccggaagaggagcagatgcctgggaggaccgagggcctctcatcacctcaagccacctaatgagggccaggcggcccccaagtgctaggtgcctccatttttgcagacctcaggccagcagaaattgcccgcctccacaaaggctcaacctaatggctttcttgttcctcttccctggggcatccaggaggtgcacccagaatttaagaagggcttcgggcagtgggcaaactggtatccagtggattatgtctttgcaatgttagggtcccaggtgatttttttaagctatgttttattattgctattattcttattagcagcagcaacagcagcctttgctttccctggtacttaaatgaacgaacaaacaaacaccaagccagttttgtagcttcgaagcatttctggctgccccagagctctctgtggggtgggaagattttgtttcatttaagagagtggatgatggcatatgtatctttcaaagcaaaatgtgcatctgtagctaaaactccaagagaagtgttaggggaagtttcatttggcaagagggaaaatgcggggtctgaggcgggtctcacagtgatgcggagtcgccccgctcttccagacagggctgtgggaagccttccaaatttccttttccctagatctgccagtccctctctgtcgagtagagatgggacaagtgagtttccctttcaccttcctccacacccaagtacagctgagaggatgcctgagaaaattccagtcccacacagatgagctcttcccagatacaggctcattcctgccttcacgtcatgaagccatgtgtccgttcccctacggggtcctggaacagccggccaggaaaggctctgtgggcagtgaggccctggcccgtcggctccacgccggtccctctgagcagacggctccagggttcgagcctaactgctttactttgggaggccccgcaagtgaacaggaacgcaagctccctcctggccgtttccggcgctggtgattcctgctggtgctggagcctggagggaggctgagttttcctcctcgcttcttggacctccccttcaaacacaccaaggcttagtgattaatgccatttgctgcaagtttctccaaggaaccactctgatttcacggtgaaggaatggtgctggaatgagcaggaaggcttcgagaccagacatggagaactccgccttcatttacccttgccatcaccgagcgtggcccagctagctgggtccttccttggtgcagtatctgtttatgtccctgagtgtccgaaaggaaatgaccacagaaggatagtttaacaagctggagcctatctgcagcttcctctaaagtttggttttatttaggccattgagaaaagaaaaatcaattgccgagatctggatagcaggggggagggcctcattttccttaaaataattgttgaaaagatctatgaatcttagacagcgcacaagaacgccaagagacaaatctacttgacttaaggagagtgcttgactatggaatttcatttgtacgatgaaatttctttcttccaaaaggttttttaaaaaccttgatttctgctccccaccccgctccagcccctgatattaaataacctgggtctacattttcctaataatttatcaaacatttgtgggctaattgcttgccacacataatagcccaacatcaaatatttgactttccctactctttcctgtcaagatcatgcctccccaatagccgcctcccccaccagttaaactctgaatcgcacagaaagaaaatgcaaaaatgttcctcactaagataattatcataaaaaatcttttatcccaaccccagctcaatgcagccagccccttatcactgcagggacttggaggaggctctcgagctcctttgagcctcgagtctggtagattagtacgtagacgccacttaattgtgaacccctcggctctccggggccattaggcactgatttatttttctgttacattcctgctctgccatgaagattgctgatggaacttcagataggcaagtgaggcgcagatatgacaaacaagatgtgaggtcaccacggcgttggcttagttggcgtaggtgacaggtggatgctgtaccgcggcccacgcacccctgccagatgaagagagtttcatttccaatcactatattttgtgcttttgttgggagaagagggcttggctggagaccacgttcaggtagtgaagaagacacaggagacccttgggggccagcccgcttcgggagaaccgagcctctgccctgccgtcccggggctggacacattccctctgcagagctgcagctctgtcaagaatgcgaggcccattttcacacaagtgattcagaccacggggaagccactttcagatgcattcgactttgtgttttgcttttacacttacaatgaagaggaaagaattctctttcgtgagaactttttgctcttgggagaaaataaagaaagtcacttccattcccatatgcttttcttttgagaaagcctcacgataatttgcttttcctctctccaaaagaggtcaagaggaggcagtgcgtggaggacagagcgcatgagccagccagatcgtgagatcagagataataagatgggaaacattatcagaataggacatgttctttcagcatttctttaaagcagaagtttcttgtaccgagaaagtgaaaatgccataaactatgcccccgtttctggcccctccatgagccccaggggtgtattcagggccagccttacctgcctggaagacagccgggagacctgtccataccactcagtaagggcaggccaggctcaggtgtgtcctgtacccggctctgtcctctgatgggggcccagctccatccgtggagggctggggttggggagcagcagggcagggatggtcactgaagtcggctccatcacgtccagggcaccctccaaggccattggagtgagaatcagactgcattctcatttgcaatctaaatttttattttcatcccaaattctaaatgagaactggaaaaaataagttggtcaataatatgagtgggtggggttggcatttcttcttgtctttgttttcaaatttcaactactatgattgttcttcattgggtccagaaagagtaaaataaaagctggcatttctaactgaatcacgatgctggctggaggccccatctcagcctccttccagcccgggacgttggaatccacccacaggcagcttcccaggtctgcgggttggctgtgttctgcaatggtcttggtgctcagatctgcagggcttgttccccagtgaaaatcccagtttctgaagacaagggaaggcctgagagggggtgatggtgagcatccctctatcagaggctcacctcgctttccccaaaaccctcagtgggaaattggggccctgccagccctgcttcctcggccccaaaaccatgggcaggctgcaggcccactgctccacctcttccttggacgagcaactcggtgttgcccagcctcagtttgccagttctgaagcgggcatgcgaatactgtcgcccttccctgggtgcttgcaggtcgatgcggggcttcagtgcccagattctcttaagccctgaggacaggacctgccacgtggggctcccaccagaccccaggggtcagccttgccacccacatcatttgcacagtgggctctctctgaagaatttgcaggcttgaatcacatttcaaggtggcattttgtagacttctagggtgagtatttcttgcccacctcctcccaggctgtgcaccctgtccaaggatccctcctggcagctcctaggtgggtttggtttgttcagtgagtgaacaaactcggaaagctccgaatggcagccttccccggagaggtttgggacggagccctccaagccccagaggctggagctgaggtgtggaccgcagtcctgtgggaagtggactgcgcaggccctgggcatcctctggcttttttcccttcatgatcttgttttcccccaaaccagtgctttcctgaggttcaggtcagtgagcagggccaggatgcctggacaccggctgagaacgaaatcacagtgtttggtgcatcttgaccagcagtggtgcctgcccactcacccccaatgcacacacccctggggctcctctcggccagacaccccttccctgtcagccagatacttacctctgtccaaagacggcaccaaaaatcacatctggcaagctggcatctgtaccttggttggcaaggggtgggtgggtgcgtgccatccagtatgcctgctgtggtctcttggggccagcaccctgctggaatccccaccttgggcacctgaggctcagggagccaggctctgaggacccgccaggggtgctggggtggcccaggccaaatagcagcatctctacccttaggctcagggaagcttccagtcagcaaggaggtgccacttctggtaacccctgcactgcccagactgcaaagcagcccacactttccttaggactctaaaaggcctatgaccgtggtggtctctctgacacagggaggggacaggaagtgacagccctcttccatctgcccccatccccccgtctccgcggcaatccttaggttcaggcctttgagtcaacgttcagaccaagctcatgaagactctgctcaatgctgggcactgggtcagtcctcgtgcacgtgcatacacacccaaacacacattcccacaagcacccaaatgcacacacacaaattgcatgcatacacacatcacatgcacacaaacacaaacatgcacgttagcatacacacattcatatacaagcatgtgtacacatattcatgcctgcacaactacacacccattggcgcacacacacacaaaccaacacacaatgtgcgtgttcacacacatattcacatgcacatgtgtgcacatcaaacacatatgcacacacaacatagccacccatgcgcacgaacatatatgtataatatgcacgtatgcatacataacacaaatgcacacacatgcagacagaaacacgtgcattcacacatgcaaagtatgcacccacatgaacacacagatgcacacatgcctcaacacaaaggcatccacaaaccacacatgtgcaagtatgaaaacacaccagtgcacacaaatattcacgcatgtaggtgcatgcagaaacacatgcatcctcacacacatgcacatgagtacccatgcaggcccacacaaacatgggtgtaagtgcatagacatgcacacacagtcacacaaaaatgcacagacatggatgcagatatgctgagatattcacacttacgtgtgcatacacagctgcctgctcatgcccaagacgcccccgtgcactcacacactggtgcacacaccattgttcaattcatttgggaaagagctcagtgccagcgttctttccagagccggggggatgaggcatcttgttgggggggtctcccgtcttaggtggaaggctgctgcccagctgctacaggcaggggaggcagggacgggcccagagccccccaccgggatgacagctccaggctgattgtttggcttggcaaggcagtcaggatgctgcctcgtaaacttaataatagctgccccccttttaatttgtttgaccttgacgacaataatttattatatgcactggagctctgtcatcgtttttctcctgattcataaacaaagcacttggcccggcttcctcctccactcccgagcggggccttctccagcccacagtggctgcctgaggcacaggcagggccgggtgtcgcccggggctccctctgaggcacagattggggggtcctttggtcctgcccagggctgggccctggggactccacatgcctgtttccagggcaggctggtgggccccaagttgaaggctggaaggaagcagtgcaggactggccagcctgggtgcaggccctgaggcaccgtggtgagggggccaggtctccagagtcccctgatagccctgggctgggtctccagctcactcaccaccacctcgttctctctcttgcagaggagcccacgttccgctgtgacgagtgtgacgaactcttccagtccaagctggacctgcggcgccataagaagtacacgtgtggctcagtgggggctgcgctctacgagggcctggctgaggagctcaagcccgagggccttggcggtggcagcggccaagcccacgagtgcaaggactgcgagcggatgttccccaacaagtacaggtgccacgccctcctctgagtcttcctccccttcccgtaccctcctctgagtcttcctccccttcccgtgccctcctctgagtcttcctcccctcccttcccccgcctcgccccccaacaggtgtagacaaagggccccctggtgggacacaccctggggatatgtgccccttctgggacactggcgctgcgggcagagcaggtgcaggatcccgtggccagagccgcaggtgtcccctggctccgaccgcaaatgtcctggccccagaaagccacctcctaggctcatggccctgcctgccagggctgcgctgcggggagaaactagaaaggagaaaaactcaggccagagcccagacctgcagccgctaagcccaaggctacttctgtaataaggtcccagaccgggatgggggtggcagcacccaccaccaagggattcatggtggccccaccctccggacacacgagcagctccttctcagatggtaggcaagagccagaaggggtcacccctatccccaaggcaccagccctgctccccaccaggtggcagcggactgtcccaggaggggcttcagagacatgagcgggcccacggtggccctcccctgccctgagaccaggcaggagccagcatctggggcctgggcggccttggggacctgtggcccccgggaaagacaagattcctggtctctgtggggagtgaaaccaggacattcagtccagtgctgtaaggagctatggagacttttccaacctgggcccctcctcctgcctttgaggatttcctccaggacagcctcgcaaagtcagagcaaagcccatcaggccactaaccggctatgtgattgctggggattaccgcccatccccgcaccgctccctggggacggcaaaccctccacccggaacagatgactgagaaaataaacgtttgggcaaatcccaactgcggcccttcccagtaaacgccgctcaagagggtccgtgttttctttacataaacacataaatcacaattaacaacgggggaaaagatacagtctcctgatgctcgggaaccaggcgtttctgatctgaatggatggctgggccccgtaattaacgagccgtgatatatcactgctttgctcatgaagattaacggtcatccctgggacaagggaagccgggggtcccccaagagcagggaattagagcgactccttcatccaagtgcagcggcccctccgagcagctgtgctcgggtcccctccgtgtcacctggagacccccgagtgactcccgacctgcgtcctcggtgtgtgcccagcactcagaggggcatccttgggtttgggggacttgccccactcctgggttcatgccagtgttgaaccccttttttcttaggcccaagcctagctgcaaggccaggaccagcttgagaggcacccagggagtgtgggccggggtccggcactgcctccagccgccctgggggtggtcttgggtgagggatggaaccatccaggtgccggcttccccatctgctaggggaaggccgcctctgcccctcacagcccggccacggcagagaggaggtgggcagggagacaccagcatgtgctctgatccctcggcagcgtggtgggggctccgaaggggcactgggaacaagctgtatggttggggtcccctcccgggcagagggcaggtagtcgggccccgcagtgagcctcgtcctctgcgcagcctggagcagcacatggtcatccacacggaggagcgcgagtacaaatgcgaccagtgtcccaaggccttcaactggaagtccaacctcatccgccaccagatgtcccacgacagcggcaaacgcttcgaatgtgaaaactgcgtgaaggtaacctgcggggcggccccgtctcagccccggggcagcaggaggctgcagacgggcgcccgcccccgtgctccctacaccccctggtccaaatgtagatggagtgcggcagagtgggtaggaggcccctgcggtggctcgggcccttccgtgtgactaggaaggaaaggaagtctcagggaagaccgtgtcccccaggtcagaaggatcagggccgagaccagaacccaggcccctccagagcgcggctcctgtcctcccgccggtgtggaaggaagaggctggcggggctgagccgagcctccaccccgagcccgccagggtctcagcaccacagctgaaaacgctttctgcagccctgtctcacgcagcctcagttcaggaattgttcttgaggaaagcagccggggaggctctgcggctcacttaaggccctgcagcgggtccttgctacacagagacctgtcccggcctgcttggtgcagactgcaacgtggcaagagagacaggcagggccctgccccccacagccggttggtccgccagccagaaccaggccaaggcgggtgtccaggcagggcacgcgccaacggcatccgtctccccaggtgttcacggaccccagcaaccttcagcggcacatccgctcgcagcacgtgggcgctcgggcccacgcctgccccgactgcgggaagaccttcgccacgtcctccggcctcaagcagcacaagcatatccacagcacggtgaagcctttcatatgtgagtggtcgcccagcctggccgcctgccctccgggtgcgcggatgccgtggcggtcgggccgaggtgggccatcccccaaggtctcccccgatccgaggggccccagtttgttcataaagcactcatggcaggttctgacatctctgccgcgtgcagcctggtccccggcaggcaccctctgagtttgtccctcactgctccccttccccatcccgtcctcctccacggctccccttgcttcacctcacaggggctggaggggggcagtgggtgatgggagggaccagggtcctgcagaaggagctggaccctccctccctgttgctactcccgtcccccgaactcactccccacctgtgccgagctccagaagggcgtgcttctgtgctgccctgcacgtgacagtctcagcagacacccactgggattgtcagggcggtgtctctagggggccctgtctgtgcccagtgctgttccagtgcgggggccagccctgaataaaagaccagctgtctttaggaggctcgcacaccaatgggaggagacaggcaagccagacaagcaaggtggcaggcacagctctgggtgcagcggtgtggggttacagcctcacagggggccaggctggcagcctggtgtgggagctgagactgcctgttcgatgagaggcgttccagcaaagacacaaggagagtgagccctgggcacctgtggaggaggctcaggagggagctgtgagcgtagaggcccagaggccagggtttgtttaaggagtgagtgagcggagtgagaagaaagggccaggtggtggctcacacctgtaatcccaacactttgggcggcccaggcaggaagatcacctgaggccaggagttcaagaccagcctgagcaatgtagcaagacaccatttctaccaaaaaaaaaaaaattttttttttaattagccaaccacggtagtgtgtgcctgtggtcccagctgctcagggggctaagggcaagaggatgtcctgagcccaggaattcgaggctgcagtaagccaagatcacaccactgcactccagcctgggcaacagagcaagactctgtaaagaaataaaaataaataagagaaaggtaagaggtcaccagggccgggtccaaggggccttgtgggccagtgcagggactatgaccctgattctcagtgaagtcagaggcccctgaagggtcctgtctgctgggccttgtgccgagtcatcgcttcccaagcattcttacacagcatccttacgaaagcctgagagtggggcccttctgtctccagttgtcataggaggaaagggaggctacaagatgttgagtgaccgtgggctcaaggccaggctgtggagcccaaattttagcttcaggggcctggctcctggcccccggctgggtgatttgaaccttccaggctccgttgcatcagcctggagaggcggggtgctgggagcttgggaacctggactcaggtgttcttgctgatgtgggaccactcaggcactgaccacttgcacaagaggtgatgtccgccagccagccgggcccctgtcagcacctgggctgtgcccgtcccacccacctcccaagccccagcgtccagccgtcctgctaggggtgactccgcccccagcctaacctgggccacatgcccccaccaactgaggaaccaaagggagatggagctctgcctgccggccgttccacaagtactgttttcccatttgctgaccaccgatctcccaggaggagcatgtgtgcagtgtgcccggctccggcaccccgatacacagtacccctttcctctgggagaagccagcacggtgcgagctgggcaggagtcaggggctggggcggggggtgactgctcccagctgcaggtcaagtgactccagtgagagcggcaccagttggtgcctcagatgacaacgtggagttctatagcaagctcaggagcaagaaaattggacctaggtttaaacttccttgcctctctgggcctgcagacgagcgttctaaagtcccgttgcatcgctttaatgatgtgcattccaagagctgcagcaccctgggcagctggagcccactgttcccaccacactgcaggctgctccccatccctcgtggatggagtgaggacagggaaactcaactggccctgccccgcctcggcgactcttgcgcttcttgtccacacactcggctcacctttgtgccttggctttttgctaaggggataaagcttaaaggaaaaccccagatgtgggcagatcgggtttatgaagattctcattcccttagaaattagatcagacacaagcaacgcagccctggtatcccccaggccactgcacagtgtcctttggtgcaactgcagaagggggtcttcaggcttggagaggagaatttgcaaacaagtgagggagtccaaatggcgtggccctttccaggaatggtcagttgcttgcaggagaggtcacagctgcgcaggcgctcatggccagactccgtgtccacctgctgggtgacacacccatggcacaggcagatggaagccctaagcccccacctcactggccacacagacggagggggtgtcattcctggtggtgtctttcccaccaaggcgctcacctgtgccctgggctgtgtacaaacgtgtgtgtgcatgggtgtaagagaaggggtgggtagagcgagaggagaggagaacaggacagagaggaagtataatatctgggaatgaggtgcacaggctcccactgggcactttgcagaaagagcctttgctttaataagtatgcacgtgtgagagtgtgtgagtgtgggcgcgtgcaccggtgcgtgtgtgtgtgagagcgtgtgtgtggacacatgagctggtgcatgtgtcggtgcgtgtgagagcgtgtgagtgtgggtgtgtgagctggtgtgtgtgtgagtgcatgagtgtgggtgcgtgagctggtgcctgtgttggcatgtgtgagagtgtgtgagtgtgagcacgtgagccggtgcatgtgttggcgtgcatgagagtgtgtgagtgtgggcgcgtgagccggtgcatgtgttggcacacgtgagagtgcatgagtgtgggcgcgtgagccggtgcgtgtgtgtgagcgcgtgtgggcgcgtgagctggtgcgtgtgttggaggatgtgagagcacgagggtgggcacgtgagctggtgcgtgtgtgtgtgagagcgcatgagggtgggcgtgtgagccagtgcttgtgttggcacgcatgagagtgaggggcgtgtgagccagtgcatgtgttggcacgtgtgagagcatgtgagggttggcgtgtgagccggggcatgtcagtgtgtgtgagtgtgggcgtgtgggccggtgcgtgtgtcggcgcacgtgacagcgtgagtgtgggcgcgtgtctgtgagtgcgagtgtgggcgtgtgagttgatgcatgtgagtgtgtgagtgtgggtgtgtgtgagtgagtgtgggcacgtgagttggtgcgtgtgtgtgtgagagtgtgggcgcgtgagttggtgcgtgtgggtgtgagagtgtgtgagtggggcacagccagggtgtgcttgtttggccggcagggctgagtgcctccccgagggccaggtaggtgaccgaggggtatttacagaccctccctctggagggtcacctgtccatcagcagccctccagagagggcagatttgatgaaacgagacaaagttcttctcccctcagccttgaaaacgccccgccaggctggacgagcaggaaggtagagcggttaatataaatagatatcgtgatgaaagaacacgatcatcttaggggaaaagctcccagctggagtcgaaggagatcaggcagccgacgatttctggtgagcaagaagcttgctgaaatcattgtttccaccacgccgtgtttaggaagcaaattgtcctacagagagagacactcgccgggatgtgtgtgtgtggtgtgcgtgtctgtggtgtgtgtgtgcgtgtgtgtggtgtatgtgcatgtgtgtggtttgtgtggtgtgtgtagtgtgggtgtgtgtgtggtgtgggtgtgagtgtgtgtggttgtgtgtgggtgtgtggtgtgggtgtgtgtggtgtatgtgtgcatgtgtgtggttgtgtgtgggtgtgtggtgtgggtgtgtgtgtggtgtttgtgtgcatgtgtgtggttgtgtgcatgtgtgtggtgtggttgtgggtgtggtgtgtgtgtatgtgcatgtgtgtggtgtgggtgtgtgtgcgtgtggggggtgtggttgtgtgtttgcatgggggggtgtggggggtgtgcatgtgtgtgtgctgtgtgtgcatgtgtgtgattgtgtgtgtacgaatgtggtgtgtggttgtgtatgtgcatgtgtatgaatgtgtgtggttgtgtgtgtgcgtgtgtgtggtgtgtgtgcatgtgtatgaatgtggtgtgtggttgtgtgtgctgtgtgtgtgcatgtgtagatgtgtgtgtgttcctcccttttttcttagaaaaacaagaggcaaaagacaagctggtgattcgctgacaaccgttcacaggcctttaggaaaatggccggaacccccaggccgctgggtcctggagtctagctgggccggcactgccctctcctgttgagagaagatgctggcactcgccagccagagccgggcactgccgcttccatcccagtctgaggaggttcccagtagtaggattttcacttttctcaagcagggaatagtccctctgcatagggctcctgcccggggtgacctcctatccatgtccacctccagccatctccaaagggtagttgagtactgccaggagccccaaagtccgggatccccgagttggggcctcctgagaacctcaggaactgtctgtgtcaacccagaggctgccttctccggggtgcaggcagcaggatctggtgcggagaggggaggtgggaggacactaggaacactgtgaacttctagagagcaggaggcacagtctgcgtggtcagcgtcctgcccccacccctgctagaacagctgcaaaagtgaagacgaaggcagggcgggccctgagccagcttgccctgaatccactgatggagtggcagacaccatcacatgcattcgctttccccgtgccccgccctggagagcaggttcaccttccccagggacttctgaaaatcttggctcctaaactagcaacaccgtggggtaggagggtggaaacagcagtggcaagcccattctccagcaaagaaggtggcggcacagcaggaactgtaccaaccggccccccgatctgtgctggtcactggaggccagtcttgggtggggcgcatgcacacacacatatgtttccacatgctcatgtgtgcacacgtgtgcacactcagacacgcacgcttgcagaatacacacacgcctgcccagacacggacacttacgcacacagacacacatgcacctgcctgtgtatttgtgtgtacgcacacacgcatgtatgcacagtacacacatatacacccatgcccacgcacatgcacccagacagactgcttccagccccagcctcgcccctccagcggctggctttcccagtaatttcatgtggcgttttcagcagggtttcccggtcatttcatgcgggtttgtcttggcttctgctgatgttttaggtgaggtctgccacaagtcctacacgcagttctccaacctgtgccggcacaagcggatgcacgccgactgccgcacgcagatcaagtgcaaggactgtggccagatgttcagcactacctcctccctcaacaagcaccggcgcttctgcgagggcaagaaccattacacgccgggcggcatctttgccccgggcctgcccttgacccccagccccatgatggacaaggcaaaaccctcccccagcctcaatcacgccagcctgggcttcaacgagtactttccctccaggccgcacccggggagcctgcccttctccacggcgcctcccacgttccccgcactcacccccggcttcccgggcatcttccctccatccttgtacccccggccgcctctgctacctcccacatcgctgctcaagagccccctgaaccacacccaggacgccaagctccccagtcccctggggaacccagccctgcccctggtctccgccgtcagcaacagcagccagggcacgacggcagctgcggggcccgaggagaagttcgagagccgcctggaggactcctgtgtggagaagctgaagaccaggagcagcgacatgtcggacggcagtgactttgaggacgtcaacaccaccacggggaccgacctggacacgaccacggggacgggctcggacctggacagcgacgtggacagcgaccctgacaaggacaagggcaagggcaagtccgccgagggccagcccaagtttgggggcggcttggcgcccccgggggccccgaacagcgtggccgaggtgcctgtcttctattcccagcactcattcttcccgccacccgacgagcagctgctgactgcaacgggcgccgccggggactccatcaaggccatcgcatccattgccgagaagtactttggccccggcttcatggggatgcaggagaagaagctgggctcgctcccctaccactcggcgttccccttccagttcctgcccaacttcccccactccctttaccccttcacggaccgagccctcgcccacaacttgctggtcaaggccgagccaaagtcaccccgggacgccctcaaggtgggcggccccagtgccgagtgcccctttgatctcaccaccaagcccaaagacgtgaagcccatcctgcccatgcccaagggcccctcggcccccgcatccggcgaggagcagccgctggacctgagcatcggcagccgggcccgtgccagccaaaacggcggcgggcgggagccccgcaagaaccacgtctatggggaacgcaagctgggcgccggcgaggggctgccccaggtgtgcccggcgcggatgccccagcagcccccgctccactacgccaagccctcgcccttcttcatggaccccatctacaggtattcagcaccccagcctcactggctctccctggggcggggccgcggcggtgctgggcgggctcagtgcatggtggtgtctctttcaagctcctccaaggtcgtcccccggcctttgctgacttcaggaagatgcccctgttcttgggggggtctgcacccctcaggagggatgcctggcttggctgctcctaagctaggtgcctggcccgggccgtgtttgggaggccaggacgggtgctcctggacacgtgcagtttgcttgcaccgatgaccactcagacatcacactgctggcctcgagcgcctcctatccccagtaaccccaccccccaccccaacccacacccttccccacccctctctccagctgtcgtctctggtctagctctccccagcctctacctgcagaagtcagaggggcctgggctgagtgcttcctgcccctcctggtgcgctcctgcccctggagccacagcggcagggggaatggggagggggtgtctttctgggggccccgggggaatcagagaaggagccagtggtccttggaggggaggaggaggcgagggatgaagcaagcattggagggttttctaggcaccagtgtcctgtgtctctgatgcctctcttggggaaaggcgagtttaatgccactccctaatttctggacaggtttgcccctccctagaatgcaggtgggttggaagagcagggctaggcttggggagggggtcctacccccaccagcacctgtccctgtgctccccgcttcgccatgcaaggagacaggcaggagaccctgagcaagtcctgtcctaataaagcaaaagcggccagtcatagacatgctgggggtgctgtgtcttgcaacggggtggcaggtttaccaaagcgctctcagtgatgggaaagaggctcccaaatctaaccctcactatgggaacccaggcagacagagaagagcaggctgccttcaagagccaccaggccaaaggagggtcagtggatagccctgcccacggcctctgtttaccacaggaggtttgcattgtgattcagtgagcaggcttgtcaccggcatctggggaaggttctggaactgtaatctccagcagccctggagggtgtttagacagggccctgtctgggtgctgcaggaagcccctggtgacctccccaggacagaaacctgctggccactcacgttcatcagcacacacgggcagcacaccccgtgccaggggccgggtcagagaaggagcggaggaggccttgagcctctggtgtgagccacgctctgctgtgagcaggtccagggacccccttcagagtggtccccactcatgcagggctgaccggccagttaggccggggtgcacggggccttcagagaaaactccagccgcctgcacttagcacccatgacctgcaggggtgctggcagccaggggtctttgaaggccctcgaggggaccttggaggcatgggaggtgtgagggaaccactgagggagagtgttcaggggcaggtggtgacagggagggtccgtctaggggtgcaggtgggctgggctcccgacatccccaaggcccacagaggagtctggtgagcgttggggcagccacggcgaggtccacaccatggccttgtgactggccaggtatatggtcaggcggggtgggcggctctgtggagcgggtggctcggcggggcgggcggctcggtggggtacgtaaccctctgtgctgttgtccagcagggtagaaaagcggaaggtcacagaccccgtgggagccctgaaggagaagtacctgcggccgtccccgctgctcttccacccccaggtacgtcctcagtgcaggtcagggcgccctgtaacccacacgccagtggccccatctcccggctgtcgaggctcagtggccaggctggagcctaagtccccgtccaggccataccacgcacagacgccctcaaaggcagaggaggattctctccctgaggcccctcaggtcactgtaggctggagaggttgaggactgagagtgaccctcacagggccaccccagggacctctctgacccctggctctgggctccaggagggagaaggagcttcactggagtcgtgggcagagcctgaaggagcgagggcagggattgtgagtgaggggagcagcctcaggtggcagcccaggacacagcgtgggcgctctctctggggtgcacaggacctgagtatgttcaaatggaccggaagagaggaagggcctgagcatgcagagaggggcatggagccaggccccagggaggtggtgggcagggggtctggaaagagacccagagagccccccagtccagacaggtgggtgcagaccctgccaggcctggaggtgctcctgcctgcccctgaggccacatcctgggagcaaaatagcaggtgggcagcatggccagggcagagtcttcccgacctcctgtcccctactgacttggtctcattgctgggagcctggccccttccgcagcgccatgggctgcacctggagggtcctgagggtcgcacagtgggcctggccctgacagactgcagaccagaccggggcattgttctctttctcggccttccccgccgtggacgggccccccacctggtttgtgaaacctgcgcccaggctgagttcacagctaaacttagcgcctcccattgtttccccggggccgtggagtttggttaataacttcccctgattttcctcgggatgggctggaaagagccacgagccagccaggcgcatcctgcgtttgtttgtgcggggagcgaggccgggaatatctgatcgggcggagcaagccgggcgggagaggcccacccaggcccgaggaagggagcccagcggggggcagtttccattgtccctcctgcccgctgcccccacgggcctgccacccccgctgcctgtccctgcagcccggagccaggaggtggggggcgggaagagagagatgactaataagtcaccaaatggtctaaggttgggctgtcacttgggcagaaggcgccagttactaaagacctcgacaaagcccaagaggccatgcctgtggaaagacctcagccctgctgctccgggctgcggaggggctggtgaggcccagttgatggctcagggagcaaggcagcttccatctgcccatcgctcatcactcgttctcatcaggatgagagcatgcctgcctcgcaggggcgggagaagcctgacccccacagcctgggtggggctggaaggggccagaggggaggccttggccactgtggacggacacgagtttctactcgttcgtttctttctgggtatttttatcgtaaccagttccccaaatagcaaaacgtccccaccactggctcatgtggtctctgggaagcatttgtagaaagccctctgctccctaccagcagcagctggataagtccctggcaagcaggtctccgaaaagctgagtgccagatgcccggcactcggactctgagagaccccagccgcgtgatgggatagttttgtttgctagtgggcagccagggctagggtcttgctgtaaatgggcgggtcacctctgtggagctggctctgagcattgcccagaggcagcgagccctatatgaagccccttgatgacgcaggtcctcacctgcccttctcctcacccccacacccattccgtggaggctgggtgccaaggaccggcaccctggccagttcctcccagtgacaccagcacctggggaaccccaagctctcccttccctctgcatctgtatcagctcctgcctcacccttgccctccctcctcatccccttctctgggagctcccaggggaggcaggctatgaaaatacctgtttagcaaaggtgtctggagggccctgtgggtcaggcattgggccctgggagcactggccccaccttcagcaggctgggtgtgtggtgccgaggcccggggtttgttccctgttttgccttttgctacccctcaggggatgatgaacactcttccttttcagcccctgtgcagccccctacagggcctggcacacagcagatatcacagggtggcccatctccttctccactgaggtcagctccaaatcttcaaagagaaggggagctgggagaggcagggctgacactgagcagctccatcagcccagcccttcccctctcctgtcgctattgtcagagacctcagtggggccaggacagtctgggattctgatcagagctctgcccaccaatcccatgcttccactctcctaatcgagcaagccctgggcatctccagggagcagagaggcagctcctgttgcccatatcaaattgccctgtgtcatgtgacatgtcacattattattttgaatatttcctttgtgggtttaagtcttaaagaggctgttgaattccttagtactttgcctgcaattatggcatgctgccacttggtggcagtggttctgcaggcccacaatctatgctttaaacggagattcaggttgctattgtaatttttcaagactaaaaaataaactttttaatgttaaactagatgtaattctgcatttaacccaaactagccaaccagaagtgctggccaggagtcaagtcagctgggcattttgccggcctgggtcagataaggggtaatcataaacatcagctacctgtatcactcaggtcccgcccaaaccgggcagtgaggctggttgctaaagatcagtttcagctcctgcaggaaagaccttaaactacaaacgagggactgggactcagggaaggacaagagcagggctgactacagaaaggtgaaaaaatccaacccagggtccaagaaaatactaggagaccattgcttccagtgcccacctgagcaccctaagatatgctgttgtacagaacccccagcagtgcgtgcccctgaagacaggtgagagtcagctgagtccataacctcccactcttatgcctacagatgtcagccatagagaccatgacagagaagctggagagctttgcagccatgaaggcggactcgggcagctccctgcagcccctcccccaccaccccttcaacttccggtccccacccccaacgctctccgaccccatcctcaggaagggcaaggagcgatacacgtgcaggtgaggggccctttggtgctgctgggacagccctggcggggctcgagtgccacacctgtggctgtgaacctgtgcttccaggaaaaactcagagtcccggccataggaaagcacagcactgcaatcagctggttatctgcttgaggtcatgctttgcaaataagtgacttgggtggcctcccctgcctcacgccatgctgtgctcttgggagctcaagaatatgcaacctcagcccagcctgaactgggaaggctgggcctgaggtgtgctggtcagtgactaacctcagcgcttggagggatgggaagcccagtgctacagcctcagccaatttctgcagtgtcaggatgacaccctcccggccaccctctgctggtgcaggcctgtccaagtctgttggagcctgccctgttcaccgccagactgaggggccgagacgcttcagggggcaggggctgctctgtctactactgtggcccatggcagcctgctctgcaactgaggctgggcttcagggccgtggaagggactgaaactgggatgctgggatgggtccacctgtgcatcaggtgtgagaccccgagcattagcttgaaaccatttctgggaaatggccatgtaagcccaccctaatcctccctcaccctccccacctccctccaccccaggtactgtgggaagatcttccccagatcagccaatctcaccagacacctgaggacgcacactggggagcagccgtacaggtaggtgctgcgtgggctgggtgtgggggcggggccgcctgcctccgtgcaccgctgacccactcctaggagtaagtatgccattcccagggctccctgctggagtgagcaggcagtgggcagggccgggtgctgaattctggtcactctggccctcccctcctggcctcagcaggatgtttgaggatgaggcaggaggtgcccaggaaccttctggaaggcatctgcctggctctcaaagatgtgagggagcagctctccacccaccctagggtgttcactggggcaggggatcctcatcagagcagggctgaccagagccagggcccagagggtccacatgggagaaaacctcagcttccccacacccagcccaactccgttcatctcacgacggccatagctgcccccacacccccacttctggtgggccagggagtgggccaaaggcagagtgagactccgtgcaaatgcgggtccccaccccccacttggagcccactgagggattccacggggtcccggggacagcctggatgggaagcggtgcgtctgcttccaggatccccccgtgctcctctcatctgaggagccggctggcacctgcagtgaagcagtcacacagctcatcgggatgggggaggcattgaatttggggctcacaacagcctcccaacaggcttgtcatcccatttcaaagatgaggggcccgaggctcagagatgccccatgaatcaccggggtcagtgcctgggagtgggcattttaagcgagagccccagacaatggtaactgggaggcgaatggggaaacgctggttttctgccaaggctggtttagtgacacatgcagggtgtgtctgttcacagaggccattggggataaagagtgcttcacacggcttaagttgacagcataagatttctgtcctctggccacacagagctagaggggccacatgatagtgcaggcactggggactcagtctgtgtctccatccctggggaaggagaccagctgaggcacctgtgcatgtcgtggtcactgacccccactctgagacagagcaagcatccccggctgccccagggctgtgtcccaactcgcagggtaaatgacagcttataccacttacgggtcatctgttcagcgctcacagccctccccaattcacaggcccccccttacccacccttcaaaaaatagtgacttacaacttaacaaaggctagcagcagaaagatttatttggtctggtcccctcccagaaaatgagctgtgtgttttttctgtaatgagagccgacttctggacagcgttgtgtgctaagagcccctagagggtcggggtggtgtttatagaagaatttaattatcattgatttcttttgctctctccaatctgtgagtttcgactttggtaacaataattgctttgcaagtttgtgttgcaaatcctgactttatctggctcaaggcaggtctgtgccgaggggtttggagcgtgtagctttccttttgataccactggtggtttctggactggctttgataatcagaaggattttaaattggaggagggaaagtgccggccatccccagaagcctgccaagaggagctcaaccccccatgcccgccccagtgtgagcccctttccggtgccagcacccacgtgtgtgcccgccgcatgtgcatatgtgtgtgccctggagaggtcgggctgacgcagccccgcgcaagcaggaggaagcaggcttctcatgggttgcctggagtgatagggtaatcaaaccagatgacattggaagcctcttccgtttaagtccttgcctcagatgacctgaaatcgttcagaatgtgtttcaaagccctgaggtagggaacgtagagcctttggtgcaccaaatatgtttcttggaggtaacttggcccctagcttctcctggcctagaggtctttgagtgaagcgggaaggtgagattgagttaatggcagtcttatttcttaaaaaaaaagttaagcatataggctttgcgggatttgggttggagaagcatgaaaattgaactgggagtggggagaggggctgctccttggtcttcgtcctgacagccggcccgggggtctctctgggaggctgcccagtggagcctggagtcacagcctggatgcgagcagggctgcccgggactcctgctgggaccgagattcctgcctcagggctgctgactccctagtctgccgtgtgcttccatcatctccccaggctccatcctgccttctgtgtgaagctggagcgtgcaagggaggcacagttgtgcttccatcgggggctgcacgcggcccgtgcatgtcctttcttttttagttgtatttttacggctgggtttcaaaatctcttctttcttcctcttccctcacttttacagtcaccaaaagcagatccccctgtagtggctgcaggagacctcactggatcctaggaaggatgccgctgcccagtgctcaggggctcgggggccctggccaccccccctgacctgcccatactctgttgttcccctgccaatggcttctctgggagtgcagcaggcacggtcacagcaaggtcctctcaaggccctccgcattgcaccagggccaggctaccctgcacgttctccttccttttggagctcacgggcgtgttattttacgcagtgagaccatcaatttcactggccgcttgtcagcttatttacaacgcagaccccagctgctcggagaactctgctccctcgcagccctgggctcacggctcccctaaatttcaaatggacttctctgtctgggccatttatttagattagaagcaagagagggccacgttcagggctctctgcaaccaaattgaacgcacagccctgttcgtggctctccccggccccagagcttcacacaagggacttgctctccagttttatgaacaagcttcttttccaatcccatttcttacctcggatccacaattgctagggtttatgcaagagccattaggtggactttctgcaaaagtctctgcatttccaaagaaaccaggaactgaatgagccgtgtttgagcacacatgcagacagacaggcagacacacaggcaggcggacagacaggaagataggcaggcaaacagacaggaagacagacaggcaggcagacagacaggcaggcggacagacaggaagacagacaggcaggcggacagacaggcagacagacagacaggcaaacaggcaggaaggcagacagacaggtagatggacagatggatggacagacaggcagacagacaggcagggcagacaagcaggaaggaagataggcaggtggacagacagatggacagacaggcaggcagacaggcagacagacaggcagggcagacaggcaggaaggcagatagatagataggtaggcagacagacagatggacagacaggcagacagacaggcagggcagacaggcaagaaggcagacagacaggcaggtggacagacagatggacagacaggcaggcagacagacaggcagacagacaagcagatggacaggcaggaaggcagatagacagactggcaagcaggcagactggcaggcagacagacagtcaggcaggcagacagattgggctgcctcaacatgccagaggggcacatggccccagctgggtgggaagcctctggctgggcagagcctgaatgctcagactggcaggtgctttgcatccaggctggagacgcagagtccagtgtgtcctttctcagcagtcagtcagcctcaaaagcatggcggtcccagggccaggcaccaccattccagtctaaggatgtgtcagggtgggggatgtgagaaaatgcattggagggtgtaaaatccctcctttctgggagattgtgtgggacacgtcgggtaggggggcacccaagcatctccaaccctgctgccgaaagggctccatcctcggccttattcttgtgtgagttcacaggccgagtcaaacaaaactgcagcgccgcccagggcaggctttgtggatggccagtccaagccagggcgctgcctgtcactgggctgtgggaggagacgctgggacccgggtgcccggaggcagctcagctgacccgggcaggagcaggggctcccagagaagaagcccacaggccaggcccctgggatcaggagcagagaaggctgagggtcacttcggggagctcagggacttcgatcaccaatgcttcttttcctgtctactgttgaagaggccagagtgagcctggcctccggcaaaggttggaaggttcaggaattgagtggatgaagccttagggcagcaccagggaagtttgctgggacgaagtgggatggggatatgcctcggccaggcgtgggagaggagtgcccttctcccaggactgcctcccgttctctaggggacccattttcagacttgctaggttttaccaggcagcctggggagttgggggagactcgcaggctctgagattccaaggacagtttctcacggccgcagcccctgcacgtggggaatgctgagctcctgggcccggcagcagcacccggaaggtgtgggactgaagcttcctgccttggggaggcccctgcgggtgtgttgatggcaggtcagactccctcgccaggcttttgtgatagcaaacaccagcccaggcccctcctgtacagggcagcaccgtgccgagaaggccgagccacacagcccctcccggtctgggaggccaggactcccgagtgtcaccaggcacgtccccatccatgtgacaagggcatgtgaccagtatgctgctctggagcgggccaccggcaccggtcggggcggggtggggcctctcggagtcctgtcctctgtgggaacgaaggccactgtgcttagaacagccacacccactccgggtgaacaaaccctgccccatcctggtgcctccacagaggctcccacagaggccctggcctggtctccagctgctaccaggcccccccggccaggatcctgctgcagtgggtagactttctgtgtgctgtgccatgggcatcatggagcttgctttgttttcaaaatatgaaaacgcatgatcatataaacagaatgttcaagtgcgtgtgtgcctgtgggatcagatgagcaccgctgcgggcgttctgatgaccaagagcacacacaagtgtgcacacacaggcatggcacacacgcacatgccaagcacccacgtgcaactgaaaaccatgcagtcagggttcccttcaccgtcgcccagcccagccgggtgcctctcagtaagccagtcccagccccccgccggatgccccccagggaggaggctgtcttcacagaggcagcgcacgtgcatctacagagctcatggggttcctccttagctcatccccagctccccctcttcgtttcaggcatgattttcttgctgctcaatgcacatgtcgctcaggccccctagttctcagccccgctctctaaaaatgggagagaacaaccctccctttccctgcctgcagggtcaccacgtgtggctgtgaaggtcactcccagcccaagggccccacactgaggggaaccctccacacgcagccctcctcgatcgctcattatgacgactttccagccgcaaggggccttgctctgataaactcagggtgttagagtcctgctctgcctgatgccgtggaggccagatggaggaagggggtctcatcccaacttccccacgtgcacggtgcaggccggcagcagccctgcccaccctgggggaataaagataaaccgagcccgggagctggcagtgcccaaaggggccagtgtggtctttgtgtccttaatagaggaggcagccaacaagtggcaacatccagggcagcccccaagccctccatgaatggactggcaaactgaggctccaagtgaggtggggcctgcccaggggcccccagccacctcgaggggtggaggaggaaggtcacagggagctggtctgggagctggtctgtggagcccctccggctgggaaactggccttgccgagtgtctttccatggagcaaggccgccctctggaggctgcaaggagcatgtcgccctccggctgcagacctgccggccccgcggcctgggggccagggagacccagacaacagagggcaggagacgccggagggtcgggcgcaccgcctgcccaggggacacggggcacactccagggggatccaccagccagccacagaacagtaggagggtgaacgcctgcttgcttttttttttttttttttttgagatggagtctcgctctgtcgcccaggctggagtgcggtggcgtgatcttggctcactgcaagctccgcctcccgggttcacgccattctcctgcctcagcctccagagtagctgggactacaggcgcccaccaccacgactggctgatttttttgtatttttagtagagacggggtttcaccatgtcagccaggatggtctcgatctcctgacctcgtgatccacccgccttggcctcccaaagtgctgtgattataggcgtgaacccctgcttcttgaagccggggctgtttctagggacagcttccccaggatgcctttggctctgcagctgggagatccagcaacctccgggacacggcggggcaaagctgtgcacggggcacggggcaggggcgcgggctcccttccccccaccctctgtggcccggcctgccatgcagagccggggcctgcactgaggagcgcgtgtgccccttccaggtgtaagtactgcgaccgctccttcagcatctcttcgaacctccagcggcacgtccggaacatccacaacaaggagaagcctttcaagtgccacctgtgcaaccgctgcttcgggcagcagaccaacctggaccggcacctcaagaagcacgagcacgagaacgcaccaggtgggccacgcggggtggggcagcccccagagcacccacacgggcaggccccacagagggggagggggaacagcaggggagtgggcgccgggcagggaagagggccacagactacccctcaggaagccaacaggcacccctcaaaccgtggtcattaaagagaacctcgtgctctccggtgtccctaagaaacctgcctccctaacagcaccccaggtgtaccccgttcgcggttggtttgccccacggagggaggggtccagcgagaggccgccccctgatgctcccgcccctccgcagtgagccagcaccccggggtcctcacgaaccacctggggaccagcgcgtcctctcccacctcagagtcggacaaccacgcacttttagacgagaaagaagactcttatttctcggaaatcagaaactttattgccaatagtgagatgaaccaagcatcaacgcgaacagagaaacggtaagaaaactatcgcgggctggggaaagtctggacccggccaacagccctgcgtggccaccctcagaggacatgcacctccaccccagcaccagcccctaacacatccagataggcgcagtgggggcctcaccacagagggtgaggcccctgggctctgggaacctggggaagctgcgctgtctgcctcagttcctccacctggagagtcatgagagtaagcacccctgggcttatgacctcactgttaacatatgtgtgtgcaaaacactagccaggtgaccgagccgggcacaagttcagctgtgccgctgacactcaaggacattttgatttaatctgaggcactaaagatttccaaaccaaaatgctgcacctttatacacacatgtacacacatacacatgtgtacacatgcacgcacacacatgcacacataggtatgccccgtgtacatgtacacattcacatgcacatatgcacacagagatgcacgtttgtatacatgtgtatacatatgccattgatgaatcctcacttgttcctcacctggccttgctctgggagctgcagtttaggggatcgtgcctggggacagggcaggacgtgcctggggacagggctgtggtctgggcatgggcagtccaggaactgtgtgctctgccctttgcgtgcaggtccccaaatacgggcatgcacgtgcactcatgcacacacgtgtacataacatgtgcgtgcataaacatgcctgcctagatctacacacacgcatatgcacacatgcaagtacatgcacatggacagtgtgtgcacatacacatgcgtgacggacagccgtgtgcgtacacctagagacacatgtacacgcatgggcgcacgtgcgtctagacacacagcagcagaacgatggtggaattcggatccaggaatgtcggcgcatgctctgtgcaacctgggataccagggctccgtaggcctcacttactctgggggagccttcagacaccccagcggggctgcttcctttgtgaaagctaacaccagccagctggcagagaaccgaaggtgttccaaactccaagaggcctgagggggtgatcccctgattctacagaagggaaaacggggcccacagaagtggggtgtcttgctcaggcccagaacctagagccagatcccaagcttttaccgcactggccatgggcggtctaaggctctgtacccacagggcccagctcactccccaccacctccagtaggtgaagaagaagccccctgagaccccagctccctcagagcccatcccctcctccagggcagggctgcgtcttcctgtcattgcttctaggagagtgggggtacctgggaaagaggcatccaagcaataaacacaggaggcagttggacactggctctggcaaagccacgttccaaatctgtgcccctcctaggaaggtgagctcacctgtagggccctcagcatcttcatccatcagagcccagagcgggctcagaggaaggggcggggggagaagctggctctgggccgtggtcccaaaagcctcacctccaccccagtgcaaccccacctactctgcagcccccaggctgtcccggcattccccagtgggctccaggaacgatggcctgaaaggaactctgccctggccacgctgagacagccgcatgggagctgttcgtgttccctgcagctgcgtgtcagacccatgagcgccacaggccaggccttacctacgccccacagccccgtccccaggcacaatcccctaagctgcagctcccagagtaaggccaggcgaggaacaagtgaggattcatcaatggcatccttgccggggtgggcccaggaccaggagcgtgtgcggaggctgaaccacctggaggacagcaaggcccccctaccccgagctagggtgcagcccggccgcactgcaggagacccaccaggaccccgagctagggtgcagcccggccgcactgcaggagacccaccaggaccccgagctagggtgcagcccggccgcgctgcaggagacccaccaggaccccgagctagggtgcagcccggccgcactgcaggagacccaccaggacagaaggctgtctctaagagaaagagatgtggccgggcctccccctcgcctatggcaaggcccacagtgccctgcttctcacagccctaggggtggggacgagggaggctctccacacctcagaacatacgggcacagccggcctcagacggactcagactcaggccctcggaagacccgtcctgctgaggcaaggtccccgggtccagctggcctggtcctgagagcccctgcgtcactgacgaaaatgagaacagggcaaggtggacataggcagccagtccctggggtggcgggaacgttccctgggcctcctgcagaaccagctcctgccctccgccatcaggaaggatccagttctgtcaggagtcctggtcctgcagccccgtgaacccctgagttgaatcatgtccctcagcattcccaggtggaagtcccagcccccggtacctcagaatgggactctcttaggagataaggtctttaaggagggattaagcagaggccacactgggtagagtgggccccaatccagcggcactgacggcctcttaaaaagggggcacttggagaaaatcacgcaggggagaaggccaagggaaaatggagacagaggtcagggtgatgcgcctcccagccaagggtcacctaagagggacaaaggtcaccaaggatggccaaggagggccaagggtcacataggagggccgaagagtgccaaggtttgccaaggatggccaaagagggccggcagcagcgggagctggagagagaccagggacagattctcccccagagtcttggaaggaacccggcctgccctcgcctggatcttggacttctggcctcagagctgtgaaagcgtccacggctgttgcttcaggcccccattctgtggggcttggtttgggcagctctgggaaactgactgtcctccctgttggagccaaaccagccactgggccctattctgtgtccgtgccggatgctccgctccccaacactaaaaagcaaatactctgtgcatggggggtgtgcagcagacataaagagggcaaagtccctgcccccagctggtgggaagcccatgcaaacccacgtggggccaccagatgagatctcacagcacatgcccatgtgatgagcctgggctctcaccctgcgccatctcatcccgtcctcagagtggacagggaggggtatgtcctcgtgtcatcgagagggcacaggccccaaagacagaaccccacccgagggcacctcaccaacaaccagggtgagaaccaggacccggatcccagcagctccgtggctgaggagatgggtgtgtgtacaggacgctcttggcccccaacacaggcgaccaggaccgaggaactctcctcaagccctgaaacctggtgaggttctgtccgtcctggaaggcagaaagacaagagatagacacgtggcccatctgtggagagccaggaaattgtggcctccccaagcccagttcccgtgcacacaggcgagtccgagacacggaggtcggtcgccgtgagacgctgtcactttcttgcttggatgccaagagcaggacccctgcatctcacccacaccgtggatacctcccagggcagcgggaggcagtgcccccgggcggagtgaggacaaggaagagtggccctggggctctgggcatgggcagtccagaaactgcgtgccctgccctttgcttgggcccctctaccagtatgtccagcatgtgcccgggggccctcagctcccctggggcccagcccacccaagacacagctcttggtcgtgaacatgaagatgagccaaactctagtggctcttcctgaaagaaatgagaatgcccagccacacccatgcacgctttgttcttttttatttaatactgaggaaccggagtggaggggtcctgccgggctgcagtgaccctgagggaagtcaggagagccctgggctgcagaagagtccccccacaggctccgaagcaagcttgtcctggtgcattcagactgctcacagcaggctttgggccctcactctccagatcccagagagccctccagggctcccggctctcgggccagtgcccacgtcctcgagttgtcagcctgaattccttccccctgaagtctgccctgagggtgcccctcgtgcactgcccaacccccgtgccagtgcaggtccagcttccccacaggactgcccactgcttccaccccaacaccgccccggccctggtgtcctcccggccatagcagcttgctgctgggccttgccctgcccccaccgccccgagcgcttgccctcctctcccgggatcgcccccaggcctccgtgcctctcactctgcagagtcagtggctgggcccagggacccgcgggagctccctcaggaagggggctgagtgttgtcgggggaggcagtgggggcagagcggagtcaccagcctttgggggtccatgggaaggacagagacacccaaactcagtcaatctcctcctgcatcatttcagggcggacatgcagatcgtggacggcagtgcccagtgtccaggcctagccagtgagaagcaggaggacgtggaggaggaggacgacgatgacctggaggaggacgatgaggacagcctggccgggaagtcgcaggatgacaccgtgtcccccgcacccgagccccaggccgcctacgaggatgaggaggatgaggagccagccgcctccctggccgtgggctttgaccacacccgaaggtgggggcagccgtgtgctccaggatggggcagggagggaacgtgggcgtccatcacgagggggacctccctcttcagccactcgtgagcccatccctggctcagcccctactccagcacagccacctcagggcctccacacacaggccagggcaaggctgggccaggggcaacggggtcaggggcccttaacccccccacccacccccaggggccctggaggctggaagcagagtgtggaggggaaggcatttccctgcactgagcagacatggaggcccccggccctgcagcagagctgcctgtcagcctgggacagcgcgtgcagccactagagggccgtgggcacacgggggccaagcacccaccattctgtgccggccagggccacttccccatgtcctcagtgttcgccaccaatatcgggcctgggcgacactgccagcattcccagatgcccttggggaggcccttcggaggtggcacttcctctccagcctggatgctgcccctgagtcctgggagagggagccccgggcctctctgagctgcctggggtcttagagaattgaagccttcttctccaccctccactggcaagacctgagccccctgcctgctgcctgatgcgtgtgcacgcactcaccccctccctgacctctgtccgtcactctcctgcatccgtgtgccttcccgtccaggcgtctgtgtgtccgtgtgtctgtctccctgtgcatgtggctggcagagatgcagcggcgtgcatgcaggcccggagctgggcttgcagcatcagagaggcggccaaggccaggctgctgacagcaggccttccctctccccggtcattggtgcaggtgtgctgaggaccacgaaggcggtctgttagctttggagccgatgccgacttttgggaaggggctggacctccgcagagcagctgaggaagcatttgaagttaaagatgtgcttaattccaccttagattctgaggctttaaaacatacactgtgcaggcaggctaagaaccaggtaggtacccgccagagcccctcccccaccccacctggcctcctcagccagaggacagccagcactcctctcccgccgtggccctcctaggcctgaggaagctctggtcacgcaaacgcccccacgctgcatcctccagagaggccccagcgaccaccgccctcccgcaagctggggcgcagcagggaggggctgagagccgatgaccctggcaggaccctcacgagggagctcactcatggacacgggcagctcaccttcctgtggtcctcagtgggaaaggtctgtgagcaggtttctggcccgcccagccgccttcgtctccctccctctctgatctgggccccagtggcctgcagcccgggcttttcccgggggaagagctgtccagccgggcagtctctgcttcccagctggagcaatgaggtcagcgagggtgccagggttttggccccaggcgcttctcggcttctctcctcagggtaggtggccccagggccctgctcccgcatttctctccagtctgtagggactcagggtctcattcagcactctacagccctcccagagggaacaggcccgccccaggtctcagcaaaagccgtctgcgtgtctgtctttgtctttttactaattctgtctggagtgttaactcgggtaggacagtgctgggcttccccaccttccctgcccttaacccacacacgatgctccccaggtcccatccccacctgccctgtgctgggggcagaaggatgtcccatgaactaacgcctggaaacacatctgtacttcctaagaatcccattggcccagaaacgctgcacatccctgtcccagaggcagctctttggtgtccccacggtcaccaaaacagacatcccctggcaggggtggctcttgttgacccccagttcccagggccgtcccaaaccagacacgtgtctgtagtttctgctgatcaccaggtggaggaaacagggggaaggggtgggaaggagaggaggcttcgagggggagcaccccaaagcagccaagggagctggtgtgcacaggaggccctgcaccagcaccccaatgtcctggcatcactcggagcagggggcggccctcgtccctcccgccgtcacgcctgctcatgtcttcctcttccaggctgcggggagaatccgggtcttagtccctcttgttccttctgccccctgtggcccagggcaaggttgagccaggccagggccacgggaggctgggaacggacgaggcttggccctgctggccggggatggcctgtcctgcccacacactcacctgcctgtccaggatggcctgccctgcccatctgctgcctgtctgggatggcccgccctgcccacgcgctcacctgcctgtctgggatggcccgccctgcccacgcgctcacctgcctgtctgggatggcccgccctgcccacgcgctcacctgcctgtctgggatggcccgccctgcccacgcgctcacctgcctgtcctgtgtgtgtgtcatcccctccccgccaggcatatgcaatgatgctgtccctttccgaagacactcctctccacaccccctcccagggttctctggacgcttggttgaaggtcactggagccacgtcggagtctggagcatttcaccccatcaaccacctctgacgggctgggcagccgggggccggtggccagagcgagggcaccagccacgaaggacggaggcgggcggggccccggagaaccctgtccctgcgtgtggccactcctcagcatcctccccacccaccatggttcattccgacttttccaatggaaactcagatcccaaaagtccctaaagcagtcgtagagtctcaccatctccaaggattggtcttgagaacactgttcagtgacggccatgcaggtggccgtccaaagacagccaacggagctgcctcgcagaatcagccagtgggcaggtggacgctctgctgagacagaagctggtggccactgccgggtgcccgcgtggggtcgcggaagggaatggatagactggtgtgctcaaaagagagagatcactcaaatgatttttataatgaaatgacaagaataacccttttggtaaccgtattgactgcagagtctatttaagcatgtggttttaaaaatagacagtattttttaaaaatcaaaaaatgacttgcaaattgttttttaaaagtaattttgcattgctttgaaatttgagctcatttgcaaacccgagtctgcctgggaacccgcactgtgcctgggtgtattctttatactgtagataatggagaaattttctatctctgtccctatttgtataagccaaggtgatgctgggtgccccgaggcagaacaagaggcgcggggccacacccgtgaaccatgcagacggccgaagaagtcttaggcagggcgccctgggctgcaggcctgcccgaggctgggatgggaagtgtgcctgccctcgtgtgacatggaattggtgtcaggaccgccacgtggccttcagaggaatccacaggtccccacccaagatccctcaattatatggggaagtcgagggcctgtggcttggatccgccatgcagagatgtggccgggcacccatcttccttccctcctctgtccctgcctcggccaccccacgcgggaacccagcgccgtcctctgaaggcagggccttggccacgtcctgggtctcccacctcccacctgaccccagcggctccggtgtcctccacgtggctgccctggggagcaatcccagcggatcgctccgggccaccaagccgcacctgtgcctgagactccggatggacgacacagtcgtcacgtcgctcttcctgcgggttcttggcgagacacagcttgagaacagaagggcgtcgggggaacctgccgcaaggagcagagacagcacagccccccgggcccagccgcctccctctcttgggacgcaacttcttccccactcggatgggctttaaattattcccataggggccaatttcaaataataatttttttccctgatggaatttaccttaatctgtatataacttgtaattttttctaattcatttcttttcttattttatttcctccttaacagtatttttggcattagacattcttattgtgaagaaataatgttaatataagtatctggtgaaggaccaaaaccgtgtgataaggttgtgtgtcgtgtgggagtggggcgattttttatgtgccaaatacccccgtcccccccatgaatcctgctgtccctgctgccgtttaccagacaatcatatgtttttgttaaatttgcgtttcagttacatttgcatttaagacaagtgttctatttatttcttgtattgtttggaagaaaaaatgatgatagagtcccaaaaagaagagaaaaaaaatgcccaagttgccctttaaaaaaaaagagcgtaaatacaaacaggagtggtgcaagccgccttggtgtgggtttgtgtcacgtgtggacatctcctcaggctttgtgtcacgcgtggacatctcctcaggctgtccccagcggtgacgggaggtgtcctggctgctccaggacaaaagacaatcgtctctgtgggtgccgggtggtccaggcttgcactgaagacgtgccacggggaggctcctgcaggaggctcaacccgacggatcacagtgaaagggattcctcccacgccagatctgcacaacgaggcaagacaggacccacctgtgcgtgcgctggggccatggggtggccccgccggggcagcgggggagctgcctgcagaagagccagctggcgtgtcgggaaggatccaggatctgcaaacacaactgctcaggccttctcacgcgtttccacaacatcccctgggtcagacccaccaggtaccccgtaggaatttccagtttcccttgatctagatgggattcttataaaaattcaacctcagacataaacaccccatttctgtaaacccaaattatatggtttcttctgcgaaagagtaaggtgtgtgcttttttttttttgcaatatgaccccgtctctctgaagtgggacattcggacggatggagccctcagcgtgtcttttcagcaggagcagaaccgatgagagccgcccttaccgttggtctccggatcccccagtcccatcccgccgttttcggctgtcttcctaaccgtcctgtcttctcttggcgctctttccttccacctttcccaagagtcctggttgcacgttttaagtcatatattttcgtccccctgaaaatgatggcaagcccagtttctcctgagcattcagacccccaggccccagcacttggcgttttcaggaggccctgttcttagagcccctgacaaaggcagcacttatttcctgggctggtgcgccccaaaacacggccccgacacttagtgtggccccaggccccagcgagcctcgccctcccagttttgctctgcccagcagtgttggtgcccagagatgacaagggccagggagcctggcccgggtgtgagaattcagagattctggcctccagctgtcaccacaccgtaacggggccatgtaactgtgcagcatggacagggatgcgacggggcagctggctgtgtccatggccaggtggccagggtcagggctgcaagccaggggtccagggcccttccgttcagcccaaatgctgccccaatgctaactccttggattgtcaacccccatcccccaaatggaaattccgaaggaggcctcctcgcacctgccctccgctgctcctcagaccccagcccccagcgagccgacgtccccacccgttcctgctctcatccccaggttgggcacgtggggttcctcctctgtgggcctggcagacccttcatgagtgggacccaagatatcactgacttcaacccagaggatcgagcccctgcaccctgcctggggccctggggtgtggagcagtggctggggtgggcgtggtgtggcctgagagactgcccagctggagaggccttcctttacaaggccacgcgtgcagctgtcccatccagaccccgactggccaagacctccacgtccccagagtccagccctggaaattccaagggccctggcgtcctctgccttccccgcttccccatgagcgtctgcaaaacacttgcctgaatacatatcacgtattttagactcgaagcctcaaagcactggattgtggtcccctgccccctctgtcccgtccccctgcccaagtgactgaaacctactgagctatattcactgtgctgtcctagggggagggagagcagagctcgcccctgcactgcagccttgtgggggagggcaaggctctcctcccagccagggacgccaggacatagctgctcctggtcagtggaggtcagccgggtatcaaaagccatgaaactgtgtctctgtagcaatgagtgatactgtgacaaaaccatccttgcattcttcctagaagagttcctctgctccttccattccatttttgtgtttgttttgttcttttctgtcactgatccgtattaccacttttggaaaaaaataaataaataaataaataaaaggcagcttgagtttccaaacgtgtgattcacttgtgaacaaaagtcattctaacaattgccttcagcgtcacgtgcattgccactgcgctttcggcacgagggatgctgagccctggtgtcagagtcgtaatttaaagcgtgtgtgtatatggactttgtcccttaaggtcgatataaagaatcctcgcagaatcacagacctgtgccgcccgccaccttctgccattgttacattacagatttggtttagttttgttttgttttgttttttcttttagaactgtatagtattgaaaaagaaatcaaatgtaaatgtctggttttcatataatgtttaaaaagaccattgagaaggaggctggcgctcgccccatgtcccccttgattgtaaattgcttctgttctgtttataagtaaactgtgcatgactcctgcttagcggtcattatcgtgtctgttggtgaaatttttattaaaaggaaaattctgtagatgcacttattgaatatgtgattaggatctacgtctgagactaggagtcctgaactgctgacgcgaaagaggcgcagttcccaattaatacggaaatcgctgtgggagaagaatgaaataagacgtgaagtgtaggaaatcatgaaaagaacaattttgcaaattgcattctgatgcttgtgatgaacacaaatgtacttgtgtagagacatttccttaagagaaagcctaggagaagccgatttggaggttaatgctgtagaataggactgtataccaaatgtaatctttccaatgctccaatgaatttatacatgagattgatatgcaataaatctgtgtgcttttctaagcctcggtgcccgcgagcttcattgagggagaggccccaggcctgtggaagggagaggaggagcaagccagggctcggccgaggtccaggctccctggctttgactgaggagtcccggggccaggccctgatgcccttggagctttgttccctccaccctccggggcagactcctggctattcccattttccagaaaagaataagctcaggaaggcatcaactccctggatggccccagagcgagcacagtgacctccaggtgtgtccctctgccaagcatgacagcctccagatgcagcagcctccaggcatgtcccccaactgtgcctgcctccaggtacacaggacccagggcccaccccacaggccttgccccaaggcttcctggggatgcagcattccctgttggaggtgctgggggaacccgtcttccatgccagcagtccccacgctttttagcaccagggactggtttcgtggcagacagtttttccaaagaccaggggatggatggtttggggctgattcaaatgcattacatatatcgtccactttatttccattattattacattagagtatataatgaaataattctacaactcaccatagtgtacaatccgtgggagtcctgagcttgttttcctgcaactaggccttcccatctaagggtgatgggagacagtgacagatcatcaggcattagatgctcacaaggagcgtgcagcctcgatccctcgcactcgcagttcacaatagggttcccgcccccatgagaatctcacgccgccactgatctgatgggaggtggagtgcagacggtgatgcagacgatggggcgtggctgtaaacacagaggaagctgggttccgctgcgccccccatgctgtgtggcccggttcctaacaggccaagaactggtcctggcccatggcctggggtctgggggcctctgttctaggccagtcctcaacccaccccttcctaagggtggccctccccatgtcagcctccctgaagtctgtgtccaccagcacctcacatggcctgatgctgccctgacaagggacagccacaggggtgggatagggggtgagctagaggccccggggctggagcagacccagtcccctcaggggcttctcttgtctacccccagactgcccctgggattccttcctggggccctcctgcctctgggagaggctccattcccctaccctgattctgctctgacccagaagcctagggggcgtaaacctcaaaggggaatgtccagccagaccgagcccagcctccccaaccaggactgccccaaaccgtctcacccacgtaggcccccactggctccctgctgacacagagtttaactgatgtcacccaggtgacctggcctcccacccccacccctacccagggcctctgaatgtctcctgggctccctcctgtccacccctcccagtgggccgggcctctggagctgtgcccctccacctctc

SEQ ID NO: 478 - DNA, 127839 bp, Homo sapiens
  source 1..127839: mol_type = genomic DNA
tcacgccattctcctgcctcagcctccggagtagctgggactacaggcgcccgccaccacgcctggctaattttttgtatttttagtagagacggggtttcactgtgttagccaggatggtctcgatctcctgacctcgtgatccacccgcctcggcctcccaatgtgctgggattacaggctgagccaccgcgcccggcctagcctcattcttttacaataagataacatgatatatgttgatacaacacgttttctttcttttttgagatggagtctgtctctgtcgcccaggctggcgagcagtggggcgatcttggctcactgcaagctccgtctcctgggttcacgccattctcctgcctcagcctccggagtagctgggactacaggcacccgccacgtcggccggctaaatttttgtagttttagtagagacggggtttcaccgtgttagccaggatggtctcgatctcctgacctcgtgatccacctgccttggcctcccaaagtgctgggattacaggcgtgagccactgcgcccggccaacacgttttcttaagattaaacctgttacataaatgatcgttcataatttttggaagcacacctgcccttagtatcctgtttttccactgggtgctttctgcagatggccaacgtagccatcacattcggattcttcctgacttcattctcagaggattactttatcttgaagtgctgaaggctccaggcaccatctataacgacaactcccaactttccagctcatctccagcctgtgcttctccccgactcaactcattttcaaccacgtgctaggcctccacccttggatgtcgaagagccatctccagttccacccagttcatcttcatcagaacatctatgagtcgtcgtctctgcagtccatttgtttgcccgcttgggaacagcaagctccttaagggcaggactactaccgcgctctcagaggcgctgcactggaacatcgcgggcacagggcagcgttggtcactgctcctgggtactagggcagcaaataaacccagcagctgcgtctgtctgcctggagttggatctttttggtatagatccaaacgtagaagtataaggtctacgtttatgtacttgtcagatatttaatgacctccaacgatagacatgcccccccaacacctccttcagtctttttgattctttgagaatctttgaaccacgcaggatcctagccctagggtgcggtcggacttgccgcgacgccagccgccggggttccttcccgaggcgccgccatgggatccgcggtgacctacgaggggcggctgggtggtggccattgggcgacggcgcagggtcaagggccgggctctgggatcgtggggagaccgggggtcccggagccccccagccccgcaggccactgcctcgccgcccgacgtcacttccgactggagtcaagatggcggcggcgcggccgcgggcgccggggccggcgaaacagcggcggcggcggcggccctcggtgctctgaggcgctggcgcggcgggcgcgggtaaggagtggcgcgggtgggcggcctctgggctcgcgccgggacgctggtccctccccccgaggagcgcggcggcgacggcggcggcgacacgctggggacccggcgccgcagggatggccgggtcggcggacgcgccccctcagaggtcccgggcgtgccgggggccccgggacgaggcgcgggcctccgggtcggtggccccgcgggtgggtggcggcgccgggctcctccttgtcggccgtggggtccctgcggcgaagttcgggattcggtttgtcgccgtgaagagccgcgcgccccgcgggggacgcgtgcgggctgcagagactggccgggtgcgggcggcggtggggccacctggggccccacgtggggccgggcgccgtcccaattgtcaagccgctgtgcttttctcttttgtgttcccactgagtgtgtcttgcacatttgcactccaaatttgttttgtgtcttgcgtctttgtgtttcccaaatagtttttgtgtggttttaacctggagattgtctccctcaatgttcccatagacccacgggtgtatgtgtgtgtgtgcgcacgcgcgcgtgtgtgtgtgttacagacgtgcaactctgttactaattttgctaataaagctatcaatgaacctcttttgatggtggtaagtgagacatgaagtaaacctaacaggtcagtgtcattccccaaaccttcgtggttctttcgatccacgcgtgagccaccgaccctccgggcttgtagctttgtgtcgggctgtgagctgcggcaaagaccccatagttaaccgggaagtcctgatttccttaactacgcagctgaaatttcccctaacagaaatttcgtgctggcccctcacttttcttttagtgttgtattgagattttgggtgtatttgagacgtggaacgtcttttgctgaatcccagtaggtccttagatccctttaaccagacactagaagaatcatttttaccccagaactcgactaaaatgtttaagtttttgtttactccaggtttattaaaagtgaccgaaacttttaacaacaaatggaactcttcaatgatttcttttacaatggtacacacttcgcctcggtttgatcagttgtgtccaagtattagaaaaatgtaggccttttaaaaaaaaacatgataggaaatttacatatattaaggaggaggaactgagacacactgtcatacgttcttttttagtagggttctgtgtttttgagatggtccaaactgccccatcactcttgaggcttccggactaacacttattggccaaatttttacatgtagaatcttagtttagccttgagatgacctttaaagatcatttttattaaaccccctcatttcgagctatggaaacaaatcaaaattcacagtggaactaaaactcatttacattttctgtgattccagggctctttttactcaacacatctgttttggtttgattgaaataagttaatacattttaagtgcttagaaaagtgccagaacatgataatactgctcagtaaatgtttgcttttgttgattctgaaggtggtttctttaattgaaaggttggtatgttcaggtttgttttttccttattttgtggacagggcctgaaacagtacagtttaaatctgtaagaatgtattaattttgtaagtacaaaacataacaaaagattctcactgtagaaaattggaaagtagagaaaagcacaaagaagaaacagaaattgggcataaccttcccctcttcagataaccattgttaacgtttggcagatcttcctgtctctcttggtgtggatatgcgtatttctttccttattttacagttcattcacatatatatatatttatttacattttatacaggattgataatatagtgtgtatattgtttgcaacctgtcttgccttatgatacggtgagcatgtatccatgccactaactagtcaatattatgtttaatggctatttaatatgtggatgggccgtaagttatcaatcaagtccatattgatctgtaaggtttctcaagcctgagttttcttttcattaagatttgtttgaaagtttttttaaaatcgtgggttttaaagttctgtaatcttttgagattacagtgaaaaatataaattctgctttttagcatctaaataagcatttttcttgcgggtgcagtcataagaagtaacactcaatttcagcttcctttcttccgttcttggctgtggctgtgcagttatgtacatatatctgcgcctattcttttgatgattattttacgttagatgtttatttattcatgagactgtttctttaagcagcctgtttcttttcaagttccaaacctgatttacaaaccctttttaagtcctgttaaatcatagactttccaggatggaaagcaccttaggttatttactattttcatgtcttctgagtagcttttcatgttatttttaatactcatgcagaaaaaaaaccaaaacagcggacttctactagaaaactccataatggggagtggaagaggaggaggttgatggttgggggaaaatcgtcaaacttgcatgacgatgggtagctaagggagtttccagatgatgagggacatcacctgactgtccttaccacagataactgccgccctgtgtctagggcttcacgctttgtgcgctgagcaccagctatgctgtcacctatggttacaacatttggttagaggcctggggtggtggtccatctctctctttttgaagctacaagtttctagttagagctataaaaaccacctttatggagtgtctgaaagctgtggactccattactgaaaacaatacttagcttccattaaagcagagtttctcaacctctgcacttactgacatttgggtgagagaattctctgttgtggaggacgatcctgtacactgtaggatgttcagcagcatccctgtcctctatcagggagatgccagtagcacctccttccagtgtgacagccagtaaaatctccagacatttccaaatagcacttgaaccgctgcagtgaaggaaggctcatctaactgtatggttgaattattgaaacagattattgaatctctttaagaactgtaaggatagactagatggtttacaccttgaagccaagaagtggacttcaggtctgtccacgttcctttccacctttggttttgtgactttattgaatggtcagtttcagcacttttgcttcggcatcagttttgtggcatgaggtaaaacaatgtgaggtatcctggagatcataaaggagttttcatgacgtggaatcagcattcttagtatgcagattaaattatgaaatttgaataaatttgcatagagttgatgcgtggtaaataatttaagcatatagaccattatgctgaacagcgcagaaacaactgtcttctagaaaagcaacttggtccagcaaccccttgaagattgatggtagaggctatgctgtagtttttccgaaacctgtttttttgaaaacaaccaatttgaggttatgcacagaaatggtgagtttgccctgaggcaataaggcttacttttgaagtgcttacctaactttaacttaatacattataatttaaagatagttcattgatctttgtggaaaacatgcagcattaatgcagctttcctctagggggaaaagtataagttgccaaatccttatttgtaatctttctaagtgtagatagtattgattgaatttttattgtggcatacgtaatctttagtcggaatgtattgataaataaaacgtgaaaagagatgtgcttttggagctacatttggtaggggtggttttctgaattacagaacatctgtataatttcactggaatgaatgcatgtgtcgtttaaatattctttcttaaagagaatgcctttcattccccacccccaccttcctgaggcatgaattagagttattgtatgtagtaaatctggctcatttggaatgaaatatgcttacagtatttttcttagtactgtatagtatttattcttagagtcttggttcatgtcatgcctatactgtgttttcatttattagtcctttggaacatgcaataaaggagattttactgaatacttattattttccagccattttggtgaaaagaatattttgtagctcttgcaataaatcatactctgggttttgctttgaaagagctgaattacttcttggcacagcttgtctgaaatatgtaaagctaagtgcaagtgttagtttgattatagggggcagtctgtctggaaattggtaaaacccacacattttatatgtgcttatatgtagttctattaagacctatgttaaactctggtgggataattccgtggcactttcacataatttaaattatgccatgtaagagtcactaaacccttatatacttcagtatgaatcctgtacattgcccaagaccttgttaagagaatgtaaattaaatataaattggagtatcagtgtaaaagtgacattctaaatgttcctcactctgcgaggcttattttttagggactttgctataattctgaaagacttagttttacagtacatctgaaagtaggagttttcagaagtatggctcttgggataaatttagattcttaattgtgaagctctgttaccacttgttagaaggcaggtcagctcacctgcttggggaggtaaatatatgaatgcactctcgagtaatttaatggagccctacctcaatgtacagaatgacagtatcacagatcaagaatggagtacgagtgattttcggctatggtgggggtaggtaggtcacttgtcccctgttgtctcttactatttgtaaagtgaagactatgattagtctttttgatcgggatggtttgagatgaataaagaataggcaggcaatttggatactttaggcttttcaagaacattagtaacattttttcttagatatttctcctaatacaatgagtgttgtgaaataacatggcagttattgttgagagaaaagccttcccagttatgtattgagtccttaggcgttttgaccttccctccactcttacagaacttggtggaaggggccactatgttttctacctccttccgtgcctttcacaaagccacatcctgcaccgtctacccttctctgtggatatttttccgcttggcaatttcctttcctgaggcacccacttgggacatctgaatctccatctccatgttgatggcccgtttgtgcttggacgtgttcttccacttgagactgaggtacttttcccgggaaggtcgggcatctccttagagtcagtaaaatggagctcactggccaggcgtggtggctcatgcctgtaatcccagcactttgggaggccgaggctggtggatcacgaggtcaggagttcgagaccagcctggccaacatggtgaaaccccatctctactaaaaacgcaaaaattagccgggtgtgatggtgggcacctgtaatcccagctacttgggaggctgaggcagaagaatcgcttgaacctgggaggcggaggttgcagtgagtcgagatcgcgccactgcactccagcctgggagacagagcgagactccgtctcaaaaaaaaaaaaaaaaaaaaaaaatggagctcaccaccttttacttaaatattgtccctactcctgactgctctgtctttaaaatatattcaaaccaccattcctgcagtcactcacattccaattttgggactcatctttgccatttcttttttacctcctgttcagttagctaacattctgcccattccttccctctgcagtgtcaatcatattttttgtttcagctcttgactgcaattcaaaccctaattgcctgttctcttggattctgaactgacttgcccagccccagtctttctggctgccctctcctcacctacttccttattcttttctgtcaacgtaatcttcctaaaatattcaatttttcttgccaacactgccttcttagtccatcccaggtgctaaagctgccttccttctgggctgctatgaaacccggctcctcttacaggtgatcataggctctgcttctcagtcattcttcttccatctttctccacagaccttttggaatagggtgtggaataggattagcaactcctcacacggtatctgagaactctaccacaaggtcaagtttagatttaacctggaactaagagcccccaagaactgcccatctgttctgtccttgctctgcactgaagctcacttgagttgcactgttttgcagactaaagcagacaaacatcaaaagacagtctttcatctttttttttttaaatcataaatggttaggcatttctctttaccttgaaacaagaactaatgatttattttgaggaaatatacattttttttccaaaaaaagcttgcatgtatgtagttttaagggcctcttaaactgtagaatagtgtacacactttgcaaacagtaggcattgccattatttttaaatgtttgtgagaagtagtaacatatttagagaataaatcccaaatctcaaattatttaaaatagaagagtcactttctaccaaaactaaaaaaaaaaaaacttaataaaatcttcggagaagacctatagaatcttgtagtaatataagtgtgcctgacaccgtagcaaaagagtttaagttgtcattttatctattatgacttccagttttgctttaggttgttcacctgtgaattcaggaagcctccccaccatttatgtgcaggttgtatggaaaatgaaaagagcttcgagcagctccttgtaagatgcctctgttgctcagagagtcttcatgtgagacatgaagactttggtgccaggaccactaccctgcccgtgctgctgtagtgttcttccgcttttcaggaaattcacaaatcttttgcaggattcctagacatctcttaattttaaaagtaacatctgcattggcaactccagtggaaaaatagtacacaggggtcaactgaggattcattttgttttgggaattgtgaaatgagctatcatatggcatcttgctttagaaattttgtctgagttagaagcttggcatttgagccttagtcaagaattgatttaattttccttttataagttaaagtttttatacatctaatgtagggaaaatgtcagaaaagaatctttcatggaaacttctgttactttaatactgttttgcaggaggtaataatggccttgaatctgaagcatagttctcatcagagagcaagcactgattggaaaactcttgtattctgacctgcccccagatttttacatttgtatttcttggcaattagtcttaaaaataaggaaaggaaattaacattttaattcaagagtcctttgattggatggagttacttcatgcaggaaaattgacaataattctttttttttttttttgtactgttggaggggaggaatatcctatagtgagagctaagataatatgttttaatttctttagagaaactgggtagttttaataagggggttgcagggaattattgtaggaaccctaaacaaagcttgagatttgtgatgtaataaattacatgttcagtggaatatgacttaggtgtataaatttaatcaaaagtatgagggagagcatatattaatagctgtcaataacagcaatcaataataaagaataaataatcagcaactgccatacgtttacttctgagctggcacattattaatggatgcttggagcagtagattttgaaaatttcccctttaatcttttttttttttcttcccaagtaaaggaagagttattctgacagggaaagaaccctggaatgccacaatctaaatgcggatttatagtcctttcctagcatatcagcaggtcccttatttgccattttgatatggtgttatttaattgctctaggcccattggagccggagggctgttgacctcagagctctataaacttaaatatatcaaacaaaagcttgaatcagtctcattttctcactggagctctgcagctccaaagccactgagaacagcagacccttggtttttctaatctgttacatggaaactgtgttattagtatcagatcgtcccacctggagtaaactcgatacactccacttcgctatttaggtttctctgctctatgcattcggggagtcagggcctgcgatagttgtctgtctgtcgtgttctaggcctcactgaggaaactgatcattgaaatgggagaaattactggtttatttgtgaacattctattcttgtatctcttatatatttgtaggtagggaaattgctgtatatgatatactctgtgttaaacattgtcttttggtattgggagaaatccttcggtgggtgagaggcgtgagtggtttcaagcagaaggaatttattgcctctggttcagcagcttgccacacctttcctgtctgcgcagtctctctccacacacatagaatctccttattcttaacgtatcaggtttgatttttcactttatttaatttggtaatatagtctgcactttaataccaaggttggggctgtatttttttagtacgaagctagatgattactcttgtgaaattgtattattttagaaaaggaaaactgatgaattttcatttagcaaattcctgggcagattcaatatctgtgcttttgtttagtctaacaagtggatactacatgttttcatattgacatctgaagtttacagttttttttttttttacccaaagtatttttattgctatattagcagtgggttttttggatatgtttttaagggccacataaaaatagattcaaggaacaaattaaattgaagtcctagatttaaatgtttggtttaaagaattttctacaacaaatttcaacagattctaatcgtggagtctttctgaagaaaaaaagttcacagattgtaatttaggaattgtgcgtggtagttttctatgacaatgaataccttaatagcattttaaaatcaataaaaactgtttttgagaagttggcatatttcagacatttttattatttttctagaagtttcaggattgcaagaatcttttggtcagagtaaggtcagtgttagacgacactacaaatctagtctgctaaaagctgcatcatctctgtatttgctacagtatttatttgccttgagaactactttctgtggtgattagctttagaattttttttgtgttggccatgaactttctaagactcctttcccaaaatggcaactgtttttcttgtgtctagtccatgttttcattctggtcttttaaatttgataaaaacgtattctcttacttatttctgttttactctttatccataaacttcctgaatcatgaaagttaaagttttttctgattcttgatgtcacaatgtagaattttttgtaacttaaaataattataaaatagtataagtgacctctatgtgtctattgcaaagttaattattttccagttactcctccctccctgccagagatctaaagtgatcctaaagaaaattgtaaaaaataatatcagtgatttagaggtgaatgtacaaatcaaatatgtattttcccaattctgtcccttgccccacagatgtaaactaatctttaaaaaaatctgttctcctactttgcctttcatatagatttgtagatttttacaagtccgtaaagggcagatatgaagacagtttaagtgttacatgcattacattaatgctagtttgtgtctttgtttagataaacctgctttatttcagaggattggtaatagagggtgctggggctgcagggctggtatgacccagggaaagggctgtcccacatgtgtctagattttctggtctctggacttccgtgtcagaagacagcagcttaacagttgttgaggttgtgttgacactttatgggactagtgtcttagtaatgactcaaattattttattgtggttatattgatactgatcattaatcatcaaatcatctttatgctattaataaatgtttctaagactgatttgtctagaacttgaaagcaatatcttgaaaagttaagtgcatatactcatgttattaaaaatgttagatatgtaaaatagagatcaagctcttattttctaagagtgcatgctcttctgggactgataaatattaaggtgggatagaagggatatgttagacttattcgaggggtgctgtacaaatattcaagaaggtttgattaggcgtggaaatgcagaaaagaaactaaggcataagccaaggtcagagaagtcctagggatttaaagattttcagtatctgctgttagcaaagcagaggcacttaattgtttagcacttcaaaaaagagcatttggccgggcgcggtggctcacacctgtaatcccaacactttgggaggctgaggcggacagatcacgaggtcaggagatcgagagcttcctggctaacacagtgaaactccgtctctactaaaaatacaaaaaatagccgggcgtgttgacgggcgcctgtagtcccagctactcgggaggctgaggcaggagaatggcctgaacccgggaggtggagcttgcagtgagctgagatcgtgccactgcactccagcctgggcgacagagtgaggctctgtctcaaaaaaaaaaaaaaaagagcatttggtagaattgctaaggtttcagtgatacgcttggaaagatttttctctgcctctgcactgctggattgatcattccgtttcacacgtttgataaaaccttggcctggagataccatgtattagttaaatgggtgtgtaaagacaggactgttgaagtcaacactgaatatgaaggttatgtaggattgccatggcacttccacgggggttttgagcagtgctggaggaatcttaaggaagttattccaaacatttttagatgctgtagttgctttagtattctattgcagctcgtcacatggttaccacattcagaggttctcagttggaagggcatttgagaatgtgtgtacgtattttcgattgtcaaaatgattggaggcactgccagtgttgattgctcaaagcaatgttaagtgcccataaggaaagggacagtcttgctcaaggagttggccagtccaaaatgcagggttcctctgttgagagactccgcccaggtcttacttcttttccttttacaccccttgtttttgatatagttgaataaagaattaagtttttaaaataacatttgagaattcactgtcagatttacagtgcttttgttgttgtacaatattttatgtatatagcttgacaattttgtgagtccaagagggagagaggaaaaaatgagagtctggtttttagcaattaggatttggaagtaatagggaggaggctctccccacacagatatatagtgaatctttaagaaaaagatgttatgatctttcttttctctggaaagaaataagtgcattctcatttggacagagaggaaacaggtagtgtagaaagagaagattattaattatgtagcagtctgaattttattctaacctttttttattaagaaaaagatgatagcctgggtaacaaggtgagactccatctctacccaaaaaaaaaaaaaaaaaaaaattagccaggcatggtggcgcgagcctgtagtcttagttatttaggaggctgaggtgggaggatcacttgagcccaggagttcgaggctgcagtgagctatgattgtgccattgcagtccagcctgggtgagagagtactacaccatctccagaaaaaaagaagaacatgagattccttgagataatcaaataatgcaatgttttaagtactattgtaattattcaatatcagatgttaggatatctcagttgtctgaattgtgcctacaagctagcaatgacaaaaggtgaggaaaagaaaagaagtgttaaataaagagggaaaacatgaaaagcagatggtaagaagaaggcagcatctcagaaaacagcagctccatcctcccatgccctcaggaccaaaacctcagtgccatccctgactgactttctttctttcatgcctaagatctaaaactgcagcacattttgggtgctcgagaccatcatggccaacatggtgaaactccgtctctactaaaaatacaaaaatattggctggccttggtggcacgtgcctgtagtactagctactcaggaggctgaggcaggagaattgcttgaaccctggaaggaggtgggggctgcagtgagccaagatcacaccactgcactctagcctggcgacagagcgagactccgtctcaaaaaacaaacaaaaaaaagaaataaaatctatccatccatccgtccgtctgtccgtccaggatccagttacttttcacatctcttctactggctgagccatgcccccattgtctcttggttagactgggcatcagcctccgacattgcctcttcatgcgcccctcaccgactctgcaccagccacaccaacatcctggctccctctctgcttccccaggctgcagccttgtgaggcttctcgcttttgcttccacctccacctccatataacatttctccccatactttcctggtttgaagctcgtccctttcctggcttttatgtagactgctccttctcaatccttctctgaccacactgttgaatttgcatagagattgtagtaactatctccctctccataactctttatttttttctaaagcgctttcattttctggcatgccacatattttacttatgtatttactgtgactgtcttccccaaaagggcagtgatcttcctcctttccactgctcaagggcagtgcttgacacatagtgggtgctcatggggaggcaggagtaaaaaattggtgaaatgtagttaagatgcattagcagaaaccaaaattatgagaccttgaccgaattatcttaagctcttgttaattgaggataccagtgctgtgcttattttggtgaaggggacctgagctggttcattgaaggcagcacagtgcctgcaagtccttggaagaagcttcataaatgatagtgatgatgataccgatgattcttgtgagagggaaaaggcaaacaaagggaaatggtaaagcattatagctctttccaaacatcttttattacaacatttgcattttaccgcagatgttttttgttctgttcctcaaagagaactcccctgagccagtgttaataaatctacctataaaagctttgtcagaggacacgtgaaacccctaacatcttattcacctgggggaataaggtgtcacgcagggccaccacgtggaactggatagtagtcagtaggcgtttctggtcgagggtcaggtgtgcacatctgagggatcactaacctcatcactgtttaataccaaaatatacatttttttttttttgagacggagtctcgctctgtcgcccaggctggagtgcagtggcacgatctcggctcactgcaagctccgcctcccgggttcacgccattctcctgcctcagcctcccgagtagctgggactacaggcgcctgccaccacacccagctaattttttgtattttttagtagagacggggtttcaccgtgttagccaggatggtctcgatctcctgacctcgtgatccacctgccttggcctcccaaagtgctgggattacaggcatgagccactgtgcccggcccaaaatatacatttttaacttgataacaatcttatgtcttagagaagagggttgattatgttcaatatgtgatgtttactaaggcaggacatgtaaatatagatgagaaagatgctcagtattaaaatgtaaaggaatggacttcatggtttaacttgcaattctctggctttttttttttttttcctgagtacttgcttaccaagagtttatattggtttggctagcagtgagctgtctaacaagatgcaatctcatggaatacatccttatgccaattatgaataaaagtagttcagacggccaggccctaacttaaatatagtgcctttggtggttaagggtgatcaggtgagtggttaaatagatcaagaaaaggaaagaaaaatccaactaccttattaaaaaacaagggtaaaatgtcaaaacagtgggtaggcagtaggaagaatgtcactaaattatgtattctttgggttattaacaattagaacataatgttacaatgtaagcagaggcttgtgggtcaaggaaggaaagataagttataagcaagtgcataaagaaataggagaattatgcctaatggtatgtgtatgtaaacgtgggaaatgtttagaaccttacagtggaagttctacttaaagtgtcatgatttaatttattatgaattacatcaaatgactcaaggcatacgttgcagaaaggaccattttcagagattattatttagaaacaagtatgtcatacgcatttacaagaaataattttgtctttttattttactatactatgaatacatggaacatgggtttttaaagggacaatgtagctgtttcccaacatcttttattaaaacatttgcattttactgccagttttttgttcttttcctcagagagaactcctggtggccaatgttagtaaattcaactttctaattcaggaacttgaaaaacagaataatgtaatggggtctaatggtgtttacgtacaacacagtattggtaaaagaaaaagacacttatattgcataataaggtactcaataatgctttgtatttctattaagaaagctaatttatttcttcttaggaatgatgcagttccaaagcaaagatttgatgtcctcctaatgagtccgctttcagttgtagagtacagtgaagccctagcaaagagtagtaagaaatctattttactggagataataaatctgacaaggaagctctcagcatagattgaagttgatttggcatagagttgctttataaatagccctttcagcaaactctacagttctgtatgtggttttaaatccctgtaaatttgtaggcaggtacatattacaattgtctgtttttctttttagggttcatgtaatcaaagaagtttctttgttgtgtgtatctttacagaacacaacaggaattgaaaatgaatcaggtgagtttaaaaatcagaatttatacaaatacatgacctagatgttagaccagctcttgatttttacaagatagtagcacacacattcatttctcctggattctcatttttgtttcttaataccattaattagttcattgtgttcataccgtgcatttgttcgtgcagtggaatgtgcattgtttgggcgtgggttggcgtttctgtggttccctgaggagaggactcattcttagggattttcattaagactttctttttgacctctcccttgccacactctagtgtgagttttttgtgtgtgtttgttttgaagcttattaagctttcatttttagcgttttttattttgtgattatttgttggttaaaagacacatgcacacgtatgtttattgcggcattattcacaatagcaaagacttggaaccaacccaaatgtccaacaatgatagaactggattaagaaaatgtggcacatatacaccatggaatactatgcagccataaaaaatgatgagttcatgtcctttgtagggacatggatgaaattggaaatcatcattctcagtaaactatcgcaagaacaaaaaaccaaacaccgcatattcttattcataggtgggaattgaacaatgagatcacatggacacaggaaggggaacatcacactctggggactgttgtggggtggagggaggggggagggatagcattgggagatatacctaatgctagatgacgagttagtgggtgcagcacaccagcatggcacatgtatacgtatgtaactaacctgcacaatgtgcacatgtaccctaaaacttaaagtataataataaaaaaataaaaaaaagagaggattaaaagttatttatagagactgcaaatgatcaaagaagaaactttaagcatttgtccttgaaaaacctgttctcagaataaaaacaagagggcaaatattgaaatgtaagatgtgtttctctttacaggagatgtgggattacctggtgattaaattattctgctatggatattttcatagcttcaagggtgttctgataagtagagccagttatgtggatctaataatatattctagagtaggattcttattttctggtttcaatatcatctctcttgtagttacagaaatacgtgggtgtcagaaatgttttctttttaaaatgttcataagcacttacttttaaaatatgaaggacaaaacccaaaatatgaagtatgtaattttttttttagtccttagcttaaaactctcagacttgaaaacattttgtatccctcatcaactgaaactttagacaccttttttttcatgtacaggtgactctacctagagatcacaagttcaatttaattagctgggccaagtttaatacattcagtcctgtgctgcattgagagatgtgaaatttttggattcttttgatttcattactttctttatcagaaatgtttattttaatgcagaggacatatgtcataaaaaacgaatctggcgaacacatggggcacatgctttctattattttaaaacttgcagatttattgacatgcttttgaaggcaaattatttttgaaatggtgagatgggggagggaaaagagaacagagtggattttcacagtcatcgtccatcaaagttatactcatatatatttcatagatttcatttattttcctattttaagattgattcttattacgaacctggtcacccaaaggagctcggttctctgcagtctaggaactgttttgttggaggagtcttgatcctgcgttagaatggttgtgagttcttccaaagtggaatctaaatgttaatattgttcttgttgcatcgctgttcagaaatcatttatttgatatgtctacatctttaaccttaggattaattatgccttaattcttgtacagtattagacttgtaatatttctagtgaattagacttgacacttcaaacttttgctttatatttccattatatcaaacttgtgtttaaaaaagtctgcttgccagtcaaaaagtggtagcaataactactactttttttttttttggctcttttataatttcgttttgcttttgacaagttttaatatcagatctgcagaagaccgcctttgatcccaaatgccaagtatcagtggaaaagtgtcctcttatgtttctaatggttaacacatttctgatttgggtgtaatttaaatggtctggtagtaatgaagcttttatttggattataaaaattgcccactttttatgagtaaaatttttagcatcttttgttatattttcattactagaagaatattagttatatgctgtttagacccaattgttatggcataaaatctatcagtgtttttcaacaatcaccccagtcattcttcagggttaagacttatttcaggataatttacagttttcccttctcgtatttattgctgtcattttcagacagtgaaaatgagcagtaaatgcttgaaaaactgaaaaataaccacacaacaaaattcagatataaaaaagtttgaacttgaagaagattgacttataaataaaatcccgatggttattttagggttaggttattctccccaggaatggatcagcattgctttgatgggttttaattgtcagttctgtttcttatgatgggtatggtctcaaagacaatagcatagaataatttgttgatatatgcctgacagttgagtttcagggactgcaggatcctcgtcatgggcatatcatattgtttgttattgattcctttagaagaagcagtagagtccacagcctgccagtactttcagcactgactattgaggcggcattctggactgttgcgctcagttgtatcagtgtgttccaagtcggtcctagtgtgatagctccctctgagcccagctctcacaaagctccccgacctacatattctttgctttctttctcttcccttctgttcttcactcaaaactcacccctttcttaatatctcttaacctctcaattagagcccagcttgctctgcatgtgagtcttcgatccttccgcttgagcccatgcctgggtggcagcgagagcagtagtcattgtgcctcctcccctggctctccatgctcccttctctccattctcagatcgtaggtatcctacttgcttcattaacgttccacacccatcctgatacttaacttttgagatgttccactgttttccttcttattttcctagacttatctaggaatggctttatctcaggaatggttccattatctcagttgtccctaaaattcattcattccttccctcattcatcgtggacagactgtatcccagcatgttatgggttctgcagtgaactaggtgggcaagggctctgccagtaacatactccaagagggagacagttaaaaagcaggaagacaagcaaggtaatttcagatagtgaaaagtgctgtgaagacaattaaacaagatcttgttataaaggatgatgggtagaggtgaaagaaggtctttggattacatggtcagagaaggctactctgtggaggtgattgctagtagaactgaaacttaggtaataaccaggaaccagatagacacatgaagatctggaaaaagaaaattccaggcagagtgaacacacagtagtacaaagaccctgaagtggaaatgagcttggtagttcatgaaacggagagcaagctatggtctggagcttggccctatcaggggctctgggataagaggacattggtgtgagaggcaagttttatagggcctttagggctacgggacagtgacacaagctgattttcatttttaggatgtcctccccactgtgctatggagactggattgtaagggagcaagagtgtggtgataacgtgtgttcactactgagattaacaccatgctttaggacagtttcttcagttggacgacttaatggacctgacagctttttgaaagagggtacttttttgtatttcagaactaatttgactcctgttctttttaaaaaatggtgtataagcatttcttggtttgtgttttcatctgtttattgttatagcagtcctgctcatttcttaaccaaataatttaatgccatttcagtaaactgaagcttgtttgattttttttttcccatcgtttgttccagcatagtagcttagattcttgtttgcaaatctatacaaagatgggttcgtagaattttagcgattttaatatggtatgattctaagctgttttttgcttgtaacagttactttggtgattattattagtctattgtagcaataatatatattttagtatgaatatactatgaattgttcttaatattaaggaaaattggtctaatctattccgtcatgtattgctgccactttccagttagttttgatcaagtcaatatttgaaactaggtgctttaattaaatagattaaactgatataatacttgctgataattctctgggcaaagcatgtaaaaggagttacttatataaatttaaatgagacgctaataaaatttgcttattcttatatacttttaaaaataaaaacattagtatgtgttgaccatgtaagatggtacatgcagctttatgtaacagcagccaatgccaatgttatgctgtagagcagagttaccttgctgattacagtcaatgtttgtctaaagagtatggagagaagggctgggtagggagagtggaggaggttggttctgtggttcatgtacctggagcagacctgaggagggtggagtaaatggtcaaagaagtgtgggctcagctctggggtcgccagaaggacagagtagactttgccagtgaggtggggaacctttggagggttttgaggagagggctgttagagttgagttaaaaaattcttaataaatacaaataatgaaactattctacagggcagaatcaggacttggttactggttgaaaataataataataaaaaatagtaacttaccgtgtttcatatatgtcaggcactagcctaagtgctttccgttcagtaagtcatttactattgattgcaaccacatggggtgggcaccattactatccctatttaacagataagaaagtgaatacaatcggaaatattttcttggtgcattaaagtttcattttaacatgatttaaagatgagaatttaggatttattgacctgtttagttatttgactttaaaaatcaactttgaggtataagctgcatacagtaaaaggtaactgttttaactgtatagtacaagtttcacacccgtgtaactatcactgctgtcgagtcataggacatgtctgtcaccccaaaaagttcttttctactgctctgaagttagtctttccctgcccaaggtcactactgatcggctttctgttcctacacattggtttttcctattctggggtttcataggagtggaatacatatagtccttgccctttgctgtttgtctcattttggtctttatactgtttctgagattcagccatattgttgcatgtatcagtagttcatttctttacgggagctgttttatgggagaccatctgaccatgtagatatgtctattcataatcttaattccaaagagttagcgaaaccctgggatggctttctatctttcatcttagttatctctcccccttttttctaattctaaaaatatatatgatataaaaagttgaaaccactttcactgttttatcatattattaatatagaagtatattttttatagataattataaatatgaatctgattttttcactttaaaaaaagacttctaagtaaggtggttgctatctgttttgacttaaacctcaactaataaatgtgtagtttaggaaattagcatgttgaatgaatagtggtagcccttgaaatctcattttgaatcatgtattctactagataaattagcaaattttagaaaatctgggaccttgtctttctgaatgaaaatattatttgtgaaattcaaaaaaaaattaacaacctgaatagcatttccttaagtcagtggaatgagcttgtggcaagaagcctttcctcttatgttaggatagtaacacttcggcagagaaaaaagctgtgggactgtttttctctgcctctcctttgatgccctctaactcactctccttggtcagttctggcaatgtcattccagctgtgtgaccttgggcaagtcctcggcttatttgtgttcactttcttatctgttaaatggggacagtaatggtgcctaccccgtgtggttgcagtcaatagtaaatgagtttatagatgtaaagcccttaggctagtgcctgacataggaaacaccgtaaattattatttattactgttatttttcagccggtaaccatgtcctgattctgtcctgtaaaatagtttaattactattactgcttgaattcagacccaaacatcccttctctgggctattacagaaagctcctgattgatttcctcgccaacgttttcctccctatgggaccattctccataggccttacagaacatgcagctcaccatctgggaaatcagaaaagccagcggtcgttgcgagttgttgggaatgttttcgtggaggagctgggatttgaacttgacctggaaggatgtggaggatattgatcgtcagaagaattgagggccaggtgaaagtctaaattgagaaaggcccagagtagcaaggggacctaatgtggtgagggtaggaggggccagagggtgtgccaggaacccagatgcctgtaggggccagggatgacctgtaagagtaaaatggggatttttctgtgatttcttccaatagaatttttttttttaaatccatgggtagaccgaacaaaccccatctgagatgaaaggctgtagcccacagtttgttgctttggatgaagatagtttgagaagttaaaactcagtctcaccagtaacagcctcagtgggaggcagtagaaagctccttctcctgcttaccaatcccctgtccccaccctcacccattcccattctgtattagaatcttctggacaagaggaggggatgagccctcaggtgacttattttctttgcttctcttgaacgttgacagtctctaaagccagcagaccaatgactagattttatttagaaagtttaaaaagcgttttgaatcagatactttgtagactgcttattcaagaagacaaaaggttcagagaagttgaatgtagagtagcctagatgccagaaagcctcaccccatctcgtcactctcctgcccaaaccctcttgtgtcatcccaccgctctctgaattgagtccagctctttgccctgccttggttttgcatgttccagtggtggctgcctctgctttcttcccgtctctattctggtgcagccgcggtggcctctttttattcctgaacagcccaggccccttctctccttggcatgtttgcctggactgctcagttcttaatacatgactcattttcatctctcaagtccaagtccctgtgtgacatcttctctgagaggcctccccctgccatcctaactaaagcactgcactgtcccctccttatctctcctacatcactctttaggtcactgagacgttgaacacccctagtctgccacattagcttggggtgcaggtgggcaggacctgccccttctcttggttgctgcgttccccaggtagcgctgctccagcacatggacacttgctgctaatatgtgcaggatgattggagattcctgaataacttcaggttggaagatgtcagtggcaatgggaactggagaaaggaattggacgtgacagattttgaaggatcagcagcagggtttggctctgttgaccaccctcacttcctggagtcttccccagctttggtgatgccatgtgcttggtgcctctttggctctgcgatgacttctaggactgggactcatttgctgtgcttcttcttccgtttcattctttgataagggcattctgagggctttgttttcggctgttctctcctctgctttccatcgaggattctcatccacttccatggactccatggccagctggggctgtactgctcttacagccatctctctgtgcccagacctctgggcagttgattgccaggcatttgtttgcccgttcgcagtgaccactgctctgagctgggcactctgtgccaggctgtatcgaggcgagtaagcacagcctgcctgtctacagccctaaacttgcctctctggagaggtgattaaccaagccaaccaggaagggctttcacaatacacagggcacactgttgcaagttgtggagagtgttgtaacagagccataggggaaatcctactaggttaggatagtggggactagcttctaggaggctaaagtgttctctgggtagagcccaggcctggaatacaaatgcaaattggccccttttggtaacctcaccttgctggggtctcagcttcaccaccctggggtttaaagtattgggaacttttcttctgcttttttctccattccctgcaggagcctaaacgggcattgacagtaagttgttgtgtttattaatactctgaagccattgcaacttatctcagtttattctggtatattttgctttttctcctttagagattagcagtgaaacccttcaaatgataaagactcttgtgcctgtttggggaaagcaaatgtcacagccatgttttgtccctaactttgcatacttgacactgctcacactcttttcacatgtacattgatgtagaaagttatagaaattccttttcatggcttttttttttttttttttgagacaggctcactctgtccccaggctggagtgcagtggcacgatctcggctcactgcaacctccgcctctcaggttcaagcgattctcctgcctcagcctcccgagtagctgagactacaggcaggcaccaccatactcagctaatttttgtatttttagtagagacggggtttcaccatgttggccaggatggtctcgatctcctgacctcgtgatccacccatctcaacctcccaaagttcatggcttatttttaagggaaaatgtataaaacaaagtatggaagaaaaagatattgcagggcataaagggagaaaaaggaaggaggaggaagaggggagaaagcttatagttgtaacgcttgtagtttttaatgttaacagttgtactcaggaagtgggggaggtgcccaggaaggggagaacgtaggacatgaatgtttggattaagcccccctgcctccctccactcttgtaggtttggtctctaggagtcggtcctgtcttcttagccctgagaggggaggtacgatggaagactggaggcggtcttagtgcagtagcagcttgagctttttgatgatgtttgttgtatctatggatgtttaccatattggaaattataacaaagtattttgaaatagttatagatccacatgaagttataagaatagtgtagagagtcctatgtactctatttatttttgagaaggagtcttgctctatcccccgggctggagtgcagtggcataacctcggctcactgcaacttccgcctcccgggttcaagtgattcacctgccttagcctcctgagtagctgggattacaggtgtgcgccaccacgcccagctagtttttgtttttttagtagagataggtttttaccatgttggccaggttggtcttgaactcctgacctcaagtgatctgcctgcctcggcctcccaaagtgctgggattacaggcatgagccactgcgcccggcccaagtcctgtgtactctttacccagccttttctagcagtaacatcttacaaagctttagtacaatatgaaagctaggaaattgatttggtataataatgctagttagactacaggccttattcataaatcagaaaaatttaaaacataagattaaacaatcacacatttcataagccaccagaatgatgacattttcacacatgatagcctccagaaaactccactctacacatctgagagtgaaaaaggcagacaacatcttagtgttgttatagcaatagctctgaccttgtgggccccagaaagggaattctcaggtgtccacggactgtgaggtatgagaccccactgggttggtggttagaatgtagactctggaatctgtctggattttatcttggctccactacttcaaaactatgtagcttgggaaagttactcagcagggctgctctgtggcatagtatttgagaatccagaccctgaagcgagattgtctggattgaaattacctagctctgccacctgctggctgggactatgggcaaagtttagtttcatctgtaacgtggagatcatagaagtgcctatagcaattggtagtgtgcagattaaatgaggtgataagtgctcacagttgtatctgacacatcttgaacgctccatctgtgttagttgtgattgttactgttgtgatgattaaatgaggtaatgcatgtaaagtgcttagcacagatcttggctcagaggatggaataaatgttatattccctaagctcctcaccccgtccagcatggaaaggtcatcctgggtcagagaaaatgtatcaggaaagcagtagaagggcccttcagaggctccccagcaaggtcaaaactcgtgaatcaaaatctgtccaaggtttcttgtctcagggagcaggaacagagaagttcttcctctagccagtgggcttcatgaggagggggtcctagcatggtgctagctctgagcagacactcagggagtatgtgttaatgactgacggatgggctgaatgaaggagagacgctttggcgattaattgggggaagagaagcgggtagtgactttctttgagtttgaggtaggaagttggaaacatcgaattaatgagatcaattaatagttaataactaaatgacattaaattgacttaaatttaacatgttaaatttaatacatactgttccagatctgttcattgatacatgtttaaagactgtacttcattaagcagtcaaataatgagtcctcattgaggtcagctaatagggaagcagagaagttctttagcttctttcatatcacagtgatcagtgttaaaaacccatgagacaggaacatacttctattcaggggcagcaaggacagggcgtactgggagacgccagcagctggggtgccttgcggagcttgcgatctgctctctgctctctgcttgatgacttctattctgcttattctgggtagacaagcgaatggcgatgagtgtttctcagagaccttacccctgcctgcccctcctgcctcagttctagctgcttctcctaccttctctgctctggacacatgggtctttttgcctggatactgcgtttcctcttaatttgagatttggtcctggctgttttcttttcctgacatgtttccccaatattgtcacagattccctttctacttctagagaggcctcagcattctgtctgaacaggcatctccatccctactccatgactgtgttccttttttttttgagacggtctgtcagccaggctggagtgcagtggcacgatctcggctcattgcaacctccaccttccgggctcaagcaattctcttgcttcagcctcctgagtagctgggattacaggcatgagccaccacgcccagctaatttttgtattttaagtagagacggggtttcaccatcttggccaggctggtctcgaactcctgacctcaggtaatctgcccgccttgaccttccaaagtgctgggattacaggcgtgagccaccacgcctcgcgttcccctcttttttttcattcgccactgatcggaaggcatgtgtccccttttttgtgcttgagttttctacagggcatcagccattgtatgtatgtgtttaattttgtctctatttcttaccagagtgatgccgtgttgaggcaagcgtgctgcctagaacattgcctggcctgtagcagggatttggaaatatagaaataaataaatagagtagatggtgcaacttattttagacaagatcaatctgggaaatagtgccaggatcaaattgtgattctttagtataagaatcaagatgaacctgtttagatatgatattacatcttatcctgtcaggatatgtaccaagaagagatcccagtttatgagtatgtgggggagagaattttttgaaaacattcctttgttcctaaggttcacttgtacattggttgcttggaattaatggcataccacattttctaaaaaaggattcttatattgatccagaagaatacctacctcaatttcaagaaattcaggcacatgtggaggagatacttcctgatagatgacccagctctttcatttatttctatccctcctttttaaaaaaagctttaagttagcttacaaagagccatgtactcattcaagtatttaagtgacaacaaacatttgaaatctactgctaagctgggggaacacaacactgaataagatagacaccatctgtcttcactgcagtctcacagaggaggcacacagtaaacacacagctatacaaataagcatttaaaattgtggtaagagctgtgaaggagaaccaaggaagaaaagagggtggttctatttcagaagtccagcccatgaatctaccttctacttctcaaatcattgattttctagaaatgttctaggcagtttgcagccatagccacggccatggagagtccagcggggctgtggggaagaagggagggagggccctggggctgcccagcgtctgggttgtgctgctgtgaactgaggtgctctgttgtagtttggtctttttgtaatgtgaaggatacgacaataacagaaaaagctttcctctgctgggtgtatgagtccaaaaggaaaaaccaatgggtctagtgggacaagatgtggaataaaggagtaatttaaaagaaaaaaaagacaaaaaataatgggttgacttaaaacagataaacaaatacataggattttttggtatttctttttcccatggcttctctgctgaggtccttcatgttctcgggcgcttcagaaattttaatacatgtgatctctaacttgtactcaagttacacatttcttgtgggagtgaccattcctgccttaagcaccatctcctgctgacatttccatggaaatctggaagttttaggtcagaggttcttagatgatattccagcagaatcttaagtgaaaactccttgatgattaggactgactataggcactcgaatcagacagatattcagatccaggctttgagccctttaagcaatgtctctaagctctaattccctgctctgtgtggagagggggagacactgataatacctgtctcttggactatttggagtacattctacccagcatgtaagacagcacagtgccttgagcgaggaagttctcagtaaatacgaagttgtcattagaattactgtgaaagtgcctggaagtatccgtttaggttagcagacatggtgacttttcaaagcggctgtgctcctggggaggataaatggtgctgagtgtttgcctagggtcccagctgagacggaagaagaaaatccccttttactttactaaatggccagtgctgataggacatcactctggctaatatttgttaatgtcacttactttatcagtgttatgaaataatcattatgtagcttaggatgccaatgccaactaccagtgtaataccttttccctctttggaaataaattgttcacatttccaaaaatccagcttatagattaagaatttaaaaatggggacactatatttagaagtgaaaaatgtctatggttaatttattcacactttagctaattaaaaataccataagaccattttctggggctaattggctatcttatgttttggaaaatgtttcagggatattgttgggacaaaggtgtaaatcaagcaggaacaaagcatttgtgtgtctgaaatggaggctcagttggctcggctctgcacgagagacaaacctgtctctagatgccctctcttgggctctcgagcttgaagcaggccagagagtagatgaccatgtttataatgactgtgagatttatttctcttgaagtagactgttgataattaataagccaaaaattgaaatgctgagagtatgccagtttggatgatattcttttcttggtacatatattcttgaagacgacaagagcttcctggttgtgggaaaaattaatcttttttgtttggggtttacttttgcctgtgttggttcatttaaaagtcctggagaagtgtttccctgtgcagtgaaatgaaacacactcagactacaaagcctatcattcttagcagtgccgtgatgtgcacatcagctccgtaggatatatggtgtactggttactagacccttggtgttcctttgatttgaaagttaatgagaaaataacagtcatattctcccagttggctcaaatctctcccttccttacatacatatctaatagtaatcttttcttaagattatgatgaattccagcctaaactttgataaataatttaaaaaaattctctgtttcttagcaactctgtgatatcctggtgactttgctgtttagtgacttggtaaacagtggtaaattactgtttcctggaaaggtggcacttgcagtaagggaccacaataagttgtcgtgttttggggtggaatattcaagccccatccagttaggggttgttgctggagggcaacatggatggggcagggttggagggccccagtagcctttgtggtgtgtgctgaaagcattcattgaagtgggcagtgttggtttttattttttaaatgtgctaaggtactgatggtagcctttgatttagaagtaagcttatgctatattttgctgccagattctatttgtgtttaaagcagtatggtggcagagattatcatattttggaaatggccacaggtggctggaacaaaatagagtaacacagacatgcttgaaggttgcagtggtttcctttggacagttacaaacaagcatcaaagcagctcctcaaatgcttgacatcatcgttttggtctgtcttgccagcttcaggtttcggttacatttttgcatacttgcttattgaaccagaaaaaaaaaaaaacccatgatttgagttttctttcttttgctgtgatccttccatttcttgacttgcagaacactactgagcctgtggcggccaccgagaccctggctgaggtacccgaacatgtgctgcgaggacttccggaggaagtgaggcttttcccttctgctgttgacaagacccggattggtgagtgctcctcctgtcacggagcaagtcaggcagtaaagagcaggtggcagtgaggcttcctgcaggggcatgtcaggtagggagcgcaccataaaagcagcaatttacccttgacttagaagattatatggtgttgatgcattttctagtcaagaatccaggttggacatgggttgtaaaaataaaaccaggaacacacaaacagacacacacacaaacacacacacacacacgtaggtcccatccctcttgcctgagtgtcctcctcctctgagtctccctgctgagcctcaccccacagaacgtgttgttcccttctctctgatttcaccatgaggagcatgattgtaccattatattcacttcattgttttgtaatatttttacacttggctctgttattgcttgtgagtgcctttatttcttatgtatctttgtgcctccagtaccagatactttgtggaccctcagtagatacttgaatgaatgacatgctgtgagtgtatctaaattcttctggctgggatttctccttgaacacaaaccaggcgcgtgtgtgtttggtttttatgtggcctaatctttagacagaagctaaggaagtaaattgtaaaactttagtcaaaatacagtcttggaatatatcatatttatatccctgtttcttttttttagatgtacttccgatatcccaatttatatgtacatatgtatgaaaaaattttaatacatgcttttaaaaattctcattggaaacttattcattgagcagtttgaacatattgttcaaatgaaagtggttgattttatagctcaactgattgttgacttacatagcggacttacagagaagtggaatttgtacatcctagcaggataggactggcccagcctttaccccccattctgtatatgaggaaactgaagccaaaaggtgagggaaccgatctaaagtgatgctgttgactgctgggccagactcctgccattttactgtctgcttgctcattatatcgctttccgttatggtcagtgcatagtaaatagaaacaaccctaagaatactgtggatgaacagctattttggctgttagaaactctgaaaagtgagccgttccagtagctaagttttcaggaagcttagttaggcaggaaagggttttctactttaaagcaaatgaacttcaaaactatttattcataaaactatatttctaaccctttataagaacaagtcatgttcattagagacaatttgaactttataaacaagcagacagaggagttcaaaaatcagttgtagtttcactccattccaatattttttctcttcagttgttgtgactgtgttattcaagtatttgtgatcctactgtacgggtagtgttacatgtaaaacattttaaaagtatataaaacatttttttctaatcgtaaaacaatataggttctttatagaacagaagagtataaagaagaaaaataaaaatccccattgaggacttgacttaatttaacttgatctcaggctattttaacattagcttgatttaggcagtctagccttttaactgttttgtgaaacttaagcgattttaatggtttcaatctttaaaataaccatgatacattataaaaatactgattttattttctaggtgtctgggccactaaaccaattttaaaaggcaaaaaatttgggccatttgttggtgataagaaaaaaagatctcaggttaagaataatgtatacatgtgggaggtaagaagtaattctgattctttgtttttcagagttttatgaaataattattctgttctctcagaatttgacattttgaatttaaaacaatcattttaatgtgttctttaaagtcaagaatatttttattaaagagaaaatgtgtttccctggatacagactgctatttatatatgcttttgtattttgaaactgcttggctgtcctcaacaataaatgtcaaatccatgttttacattgccgtgtccagggtgttttgctttgcaactaagaccgtgacttcctgtttgatggtttgtcacttcacaggccgccacataaaccccataaaagacactctatggtggctgcaaagaaagcactgttaggttcttctctatattttagaaagtaatttctatgttgctaggatattcagttggatatatttagcatatggcacatatatagagcttgtaatttttcaggagtttttcatctattaatttcatgttttcccagcaattctggaagacagcagggcatctgcacactcctttgagaggagaagcagtcaggagacagagctgagctctccttccctggggggctccacccgggaggcctgtagatgcagaactagaatgcatctctcctgcctcactgggaggcagttaaggttttcattgcattgcctgagttcaaatcctacctctagcttcgtgacttgcagcaggggacatagcctctgggctagaaaaccctcaattaaaaaaatagagatagaagatatctcctaggatagttgtgaagataaaatttgtcgttgttgcttttgttgttccctggggtattgcgtaggaattcagcatttgtgatgaatttagttcaagtcagtgccccctggaagcccccctgagttcttaaaggagctccatggtgtgactccttttcaaaacaagttaagtttttggatgatgagaaaaagcattcctgtcagattgtctgaaactgaatcacatctgttttttcacacattaacatagaaaagcctaaaaataaagtatggctaggaagtgtgtggacacttttcatcaagaagttctgtggcatttgtatggttgaagtatgctgctatttttctttatgctctaagctgtttcccaacttgaaaaatctgacagtttctcccaataattttgagttatttgtttcttatgaatttgttataatgtatcttctgactattaacggggggtgtcttaggaaatgaggatttaccacaagagtcattgcattctgttatttcaccacttttgaggtgtaagagttctgtatttgtagaaaaactgcccggccaaaaaatgtgaattactaaagataatgcctgcatgattaaaaatgtcttgaccacaaaattatgctcccaaataaactgcatttttaattttagatgtttcccaagggaaactaacaaattggctcaccaggtttaacactacgtttagtgagaataatgtcaaggaaccagaaactgctttctctagtgctgtgtttataacactaatcttgaacaaatgccatcaatattaaacttaagttagtagtacctattttatcccatgtaacaacttgatgttgttgggcatattgtataatttattaatagtgctttttgtacattaagcttcatttgcattgagattcatacatagtatgacttgatagttgttgaaaatttggaaccatgacttattagaatttcttctataaacctgttaacatcccattgttaatgtaagatacttcttatatactgtactactagagtttgcaaatctttgataagaatcctagttcttatcaagggtgccttttgtcttcctgcaattaaaaaaaatctcattcaagtagttctgactacaaaatatacatctgatatagaaacctgtaagccttttgctctgttaaaataaaagtgaatagatatgacatacatgtgtaagtatgtatatggcaaaggaagtatcaattataatgtaaatatttcttagaagaaaatgacattgaggtaagacttagtagtttcctactaacttattccaactctgctcttaccctcagacctgcatcagaatgccttgtattaatgtaacagaaatggcttatcatcagaatctcatcttggcatttgttcttccatcaaagcccctaagaccagcttatcttttagcagcagggtcttagaccccagccagaattccattttaaagctaatctaagacaaagtgttaaattgctctccttgagcccttgattatctaacccagtcttaagtcctctaagctttcactgaaaacattctgttaaatcagaaataacaggagagaaacagtagagtatcctcagggtgaatgcacaaaataggttctcacaagaagagagcgttcttcgatgagtttctggcagggagccgctagctagctggcgctcgggacttggtgttttcgttctcttgactctccccatccgcactgagtaatctgccatattttaaaaccacctctgataaaagccttttagatgtacttttatgggattcaaattgcttctaattaacagaactttagaattgcttgggtaagaattattttagtaagctttttttttcttttcttctttttctttcaaatacacttagttgtttttggagcagttttaggttcatggcaaaattgagcagacagtacagatagttcccaaatactcgctgtccccacacatgcactgccttccccattatcaacatcctacagcagagcggggcattggtcagcccatgaacctgcactgacatatcattattacccaaagtccatagtttacattagcggtcactgtttctgttatatgttctaataaagcttttaaaatttaaaattaatacatgctcactgcaacataatagaaacaacacagaaaaatatatacaagaacataaaaatcattgaaactcctatcatccaggcgcaaccactgtgaacatcttcctgaacattcttttaactccctgcttagctgcttctctattttcagcctcacacatacactggtacatttacaacctatatgtagaaattgattcaattgagatcaaacagcacatgcagtttttaatgctttttttttctttcagtatcttgtggacatatctatgtctactacttatttacgttattgtttgtttcttttctttttttttttttttttgagacaaggtcttgctctgtcacccaggctgaaatgcagtggcatgttcacagctcatcctctgcctcctgggcccaagtgatcttcctgcctcagcctcccgagtagctgggacaggcctgtgccactatgccactatgtccagctaatttttgtatttttggtagagatggggtttcaccatgttgcccaggctggtcttgaactcaggggctcatgggctcaagcgatctgcccgtctcagccttccaaagtgctggggttacaggtgcgagccactgcacctggcttatttacatcattattcctatgcctacccacaatttcattgtataccattcatgatttatttaactaagccttatgttggacatttaaattgttttaatgtttttatgattataaataatttttcaaagtataaaactcattgtatataaatatgtgttgacttgtctgattatttccttaagatgaatttctagaagtataaatgttgtcaaaaagttatatacattttaactttttataaattttgccaaacattttctctccagaaggactgtactattaattatttatacaaccaccaagagtatatgtttcttgccagccttttaaaatccagtattgttaatctttttaatattaaattgttaaaaatatctatttttgtagaggaaaaccagtggtcactgcttctattaatatttacattttattcattcaggcaacaaattttgaggtcaggagaatagagggaagaagtagaattgcatgtcagttaaaattgatagagaaattgtctctgtataatgagaagactttaatgtaatttttaaaagatatataaacttttttatcagtcagcgctgctatgattaaatattaacaggtgagttttatagtcttcgctatctcagttcttctgatttcaaattatttgtaagttaaaattgcaggcaagaagagaagtcaaccagctgattctgcagaaccttttctcagaaagtacttttcagctctcagtgctgctttctagcagtagggaaaggtttagatcaccagggaaatccaacctgccacctgtttattacagcgctggagctaagaatggtttttacatttttaaagggttggaaaaataaaaatgttttgtgacatatgcaaattatatgaaattcgaatttcagttcatgagtaaagttttactggaacacagctctggtcattcatttaaatattatctatggcttcttttgccccataatcacagagttgagcagtggtgatggagaccatatggcctgcaaaactgcaaatatttgtgtgtggccctttacagaaagtttgctgagccctggtcttgatgtgtagggaagagtagcagtaggagtgaatgtggtgatgtctggtttcaggtttgctgagaagctgagtggttaatagcagtgcataggttttgaatgaagtaattaaaggtgtgggatggctgtagaattggttgtcatagaaacagatgagccaattacattcctcttctctcaggaactgtaggacagacaaggacattgaagtacagagaattaagtgatctttttgaacaggtttacttgtactcagattggcagcttggtctggtgtaaaaaaaaaaactctctttgggagtttatttattcattcatttaacccctattaagcttttagcacataccaggcactgtcttaagttcttgaacaccatgcttggcataaaatgtttgtggtgttataaactactggtaatacctcatggaaatttttatttgtggaataaagatatactagaagtgacctagatctttccacaggcaagaaatctgagttctatgtggcttcatgaagttcctaacaaatctgttaggaacttaccctcatttaaaagtaggaataaagaaaaaaaaagatgatctcactttggtaaaaaagtgtttcagtgaaagccttttttaaataagggcctttttaaaaataatattgttagaatattagtcctggaatcaggccaggagcccatttcttggttgcttattcagtcttcttcctgttagcaaagcccagagactcttacactttttttgtgttgtggacccttttgagaatctcccccgaaagtacacaaatgcacatatgtgcacaaaattttgcatgttacttatacggttatatgggattcttaaacatctgtggttcatagatagaatttctgatttaagagtgaaaataaattatttgtccagtggccgttcactgggggtctactgtgaaccagtcaacatttgttgtgcatttgttgctgggagattttccagaaacatttgtgtagttgtagtataaaatctagttagtctaattttaagagagggtctgttagtgcggcttcaagggctcgagaggccaagctatttattttttaaacttgtattttagtatctctataaaagtaacctatgttttgggaaatgtcctctgacaagtgggcttattgaaataaaatgtgctatcacctgttagattctcttttatttccttattctagaattttcagaacattttagaatacagtgatgtattagaatagttcttaaaagaagtctctgatctcctaaagtaatctgaggagtgaagtagttgatactgaagacccgtttttgtctgtagtcaccagaaatttaattctgtaggatgtcagttttataatcttcaacaaacccttcaggtatctaattctgtaactgaaacacaactggaatttgaacataccaagaaggtatagtattttctcggtagcaatgtcaataaaatcctttatttaaaaaaaaaaaggctttcattgaaacacttttttaccaaattgagattatcttttttttctttattccttttttttttctgagacagagtcttgctctgtcgcccaggctggagtgcagtgacgcgatcttggctcactgcaagctctgcctcccgtgttcacgccattctcctgcctcagcctccccagtagctgggacttctggcacccgccaccacgcccggctaatttttttgtatttttagtagagatggggtttcaccgtgttagccaggatggtctcaatctcctgacctcatgattcctcccgtctcggcctcccagagtgctgggattacaggcgtgaaccaccgtgcctggcctataaatgctttattcaatcatcaacgtattgtgaatgcctttatgctgatcaatgtatttccacaacatctggttatctttgctgtcttctaattacagaaataatgcatgtttattggaaaaaattttcaagtatataggtatatctaacaggaaataaatcgtgccatataatctaattaatcatttgcaccacagtactttttagtgtctaaggtttcagctatatggatggaccataatttactgagttaattccatattgttttccatttagccatgaattggaagcaatttacagtaaaccacacttctgtgaacatttttgtatatacatctgggtacaattgtccaatgatctcattagaatgaattcctacaagtgtatgtgctggttagtctgtgtatattttaaatatatatatatatttttggtcaggtactgctaaattcttcacaaaatcaatttgttttctgttcagaggtgtttgggggaatatctgttttttcacaccctttcctatctttaagaaattttttttgtgtgcccatttaaaaggttaaaattgttttgctttcaagttattttttattaactaagtttagtattatgaggttttggctacgtgtattcgtttgtgaattacttcttggcctatttttaaaaattgaagtgtcatctttttctacaaaagcaagtattctctttttgtacatcagtcagtatgacttagaagatgccttagtctcctttgaaacaaaatgagttatgtatgaataaaaattgtactcaactgtaacactttgctttttgcaaatggctgtattgacctgagagccaggaagttgtggcacaacctatatttttatcctgaggcaggtagatagactccagctaccttgtgaactgtgtggttttcttggcaactatctctgtgtttgtctccgtagtctcatcagtctcagtagctgtgccagtatttgggtggggagtgagtgggactttgccatcactgcagtaaattaaaatgaaacttattatccctgagcccaggggcagtttatgttgcagatggggtaataatgtaagttactgtgtacagatactctccttggtgcctatgatgattaaagtaactacagtgcaccttctagcatggtacctgttacgcagtaggtgctcattagatgttggtagttcagttaactaggatggtcaaggaaggcagtgatacacagaagacaaggagatctgagtcgaagcctttctttatgacaattaaacaggtgactttgggaaagttatttaacttttgagcctcaattttcacatgttgaaaggagagctaataagcctgctacatagggttaaatgagataatatgtcaggcatgtagcattatgcctgatgtttgactttcaagaggaagaaggcagtgttagggcccggtaaggtggatgctgccccttggcaatcacaggcctagacacccaggcatgcccagaagagcagcatcctcaccatcagcggggggagtgggagctttgttccagaaggaaagttgcagtaaagaaaggtgattaatgtgggtacgggagggaagaaggcatgagtggtgggaataatgagaaagaaatggaaacatctagattatatcctttcttcctaaaaataaagtaaaagactcatttcttttgcccagcacgtctgtcagccagttgattctgcagttctgtttcagtgcctactcgagtgttttgtagactggttttgggaaaatgtgtatatgtatgcatgtatatacaaaattaaagttaaaaatagttgccaaatagatgttcttttaaaatgaaggatgataaataagtgctggaagcatctgtgggaggaattggtgtgggtgagaagggaaggcttcttgcaagaggagatttgatttgactcctggaaggggttgaggttttggtccttttctttttgaaggccactgatatttcccagagtctattccatcaccccttcatccttgcagatgctctggatggagtatgttttaagggtcagttgagtttgcagaagcatcatatcctgtcacccatgtgcctggttcacaatgcgtgttcactcctgaagtccctgccacctctgccagaaagggacctgctgaattgtatagccctgcagggccaggtgccatactcgattagcagagcaacccagaaagcttgggatttgggtgctgctgaataccactgcaagctgttttcctttctaagtcacactttacagagcatagttgtcatttgtctctgtgtacgtatttgtaaagcatttggagatcccaagcatgctgactatagctctttaagtttgtgtgtgtgtgtgtgtgtgtgtgtgtgtgtgtgtgtgtgtgtgtaggggtggggggcgcggggcaaacaaacctaaatagaaaaataatgagaattacagtttcgaatttcagttttcaccttgtatttttcttttctctgtcgcttgttttgtttttatgaaatgctttatatagagtacttgcatataatgaaaaagaattatccttaaaagttaaaaatggaggcattttaaagatactcctattttaacaaaagttttttacttttctccattttcaaggtgtattacccaaatttgggatggatgtgcattgatgccactgatccagagaagggaaactggctgcgatatgtgaattgggcttgctcaggagaagagcaaaatttattcccactggaaatcaacagagccatttactataaaactttaaaggtaacagcattagaattaatttactgttagttacgctgcttgtgttttcctttttctttttttgagacggtctcattctgtctctcaggctggagtgcaggggctccatcacggctcactgcagcctaagcctccccagccttgggcgatcctcggacctcaacctcccgagtagccaggactatgggcacatgccaccacacccggctgagttttgaattttttgtagagacagagctttgctatgttacccaggctggtctcaaactgctgggctcaagcgatctacctgcctcagcctcccaaagtgctgggattaccggcacaagccacaatgcctgggcctgcttatatttttctaatgctgtccttagttgtgactgacaatgactttgcagacctgggagggattatattgggaagtgctttatccacactcttaaggttctgtgttttaatatatggttacctgtgtgtgtcatggagctaaagcatgaagatcgtgttaagtaattacacactgcatcttgaaagatactgatgagttaagcatgtggcagctgcttcccttctcctatgacacagaggcattaggaactgtctggcagatttatcctactgtaagaaactatcagtaggtatggtgggtctgtgttaactgaatacacactgttagtctctgatattaatgcagccttggattagcttttcttttccctaaattttactcagaatacaaattgaacagaacatgtttcttcctttctgccaaatttttctttggagatattaattgttgaaaagaagaagaaagtcatgttttaggattggtaatgaggttatggagcacattcagggacatgagtgtgaggaagcgtggagtgttgctgcatttctttgttgagcaaaggccatatctccctcattttcatgggtcacattctttaagaagacagatccggacgggcgcagtggctcacgcctgtaatcccagcgctttgggaggccaaggcgggcggatcatgaggtcaggagattgagaccatcctggctaacatggtgaaaccccgtctctactaaaaaatacaaaaaataagccaggcatggtggcgggcacctgtagtcccagctactcgggaggctgaggcaggagaagggcgtgaacctgggagggagggtttgcagtgagccaagatcacaccactgcactccagcctgggtaacagagcaagactctgtctcaaaaaaaaaaaaaaaaaaaaaaaaaaagacagatcctcacattatacatggagatattctaaggcagaatttccagcctgttaagatggatggttgttgctttttgcaatagatagcaaaattgctataaggcaagtttctctttattcacttacttccattaaaaatgtcataggttggagaatagtctatggaaaaaatgatctccatggagttgaacacttttgatgagcacacatttcaaattgtggccagctttgcagtgtgctgtgttttgttagtgtagtggcagtaggccttctgaagtttagttaacctgtagctgtttaattttgctgcatctttcctgacattgttagccaactagactgccttttatcacatttatacccaggtccttgtatccagtccctgcagattttttgttacactttcttatttaggactttaaaaaccttgttttccatttttattctgctggatcgtagtagcatgcttttctagtaggtattactctacaattttcttatataggagtgtgaagttggattcaagaatgcattgtttctcagaagtatttaaaggagaaatacatatggttgaatcagtgaggttgaatcctggtggagatgaaatactagctaggggatgaatatgagacaatcaaggtaataggaaggaagttttggaggcatgcaagctcatgtagatattaggacactgcaattccttcattgtacttcaagttaaaatgtgttcatctctgatgcaaattcacagaaacactgagaatcaagatagaatagtggttaggagagtgaactctgaagccagactgcctgggttagatcttgacttgctgtgacccaaggcaagtaggtgtgaccttattagctttgtaaccttagctaagtccttctgtgtgcctcaattcccacattgtaagatacaggtaattatggtattgacctcataggattgttgtgatgattgcatgggtgaatacggatagagctccagcacctagtaagtgcttatacatgattgttgttatttttcacaaggtggtatggtgtcatggtcaggagtggggactctggagcagactgacttgtgagcaaattttggcttctagatatgtgaccacgcaaaggatctctctgtgtcttagttttctcatccataaagtggaggtaataataaaactgcttcatagtttgttgtgaaggttaaacaagccaatatatatatatatataaggttctgtgaacagttcttagttcagtgtaagtcctcaagtgttaactagctatactagtactattatttttacctttgtccgaaataacatagttctgatttttgcagacctcccccagtctttatctttgatatctgctcaagtatgtacaaagcctttcagattttttactagtgattatctaactctattcttctagattaagtgtcccgtgggttaggctttgtgaagaaattacatgtgctgctctgtgggctctgtatcttctcaacttattattatacccagataattgggaaatctcaacactggttttgtttgtaatatgattagaaatgatttaaaattcctgaaagttagctgttaaatctgctatctattcatttctctgttcattagtttggtgaatatctattgagagtctactgtataccaagtactctcctatagtagtgaacaggacagacaaggtctctggtctggaggatgtttcgtgttataggggaagaggcagataataagtaaataagaaagtaatttctggtagcgatcagtgtgttaagacagggaaatgtgatagagactagctaggtaggagagggctgctttgtctccagtgagtcagggaaggccttcctgaggacagacgttcgaaccccactccttggataggaaggagctggccatgcaaaaggtctgctggaagaacagtccaggaagaggagtggtaggagcaaagaccttggagtaggaataagctaatggtttttttttttttttttgagacagagttgtgctctgtcgcccaggctggagtgcaatggcgtgatcttggctcattgcaacctccgcctcccaggttcaagcgattcttctgccccagcctcttgagtagctgggactatgggcgcatgccaccatgcccagctaaattttgtatttttagtagagacggggtttcaccatattggtcaggtggtctcgaactcctgacctcgtgatctgcccacctcggcctcccaaaatgctgggatttacaggcgtgagccaccgtgcccagccttttgtttgttttttattttaaaggaatagaacaaaagcccatgtggctgtagggaggaggagaggaatcttaggagatgaggctgttgaggtctgcagggatggatgagttttaggcttaagtgctgttcacccactggcgagttgaggccgagatctgacctatgattttttaaaagaccgtgctggggactggatcgtaggtgggtatgagtggatgtactgtgtgtgtttgagtgattctggaatacttctctaattttctaatatttctgacacatttttctaatattccttacccagtataaggaatattagaactcttgcttcttcctgatttgtttggtaaaatttcaagttttattttatatatgctgatgtttaaaggagagaatatggagcagattcttggttttatacctgtttgaacccaaagagaaagtgggaagagtttaaaatctttgttgttgttaatttttttaatattaaaatatatttaaaaagaggttgtttggtcttttgactttatttttttaatgtggatttatatttcctttgttgaagggagtagtttttcttttcttctgaacttgacttaaaaatgctaaccagtacagaagaaaaaaaccaatatattataatatggaagaaaacaagccttggtttaaaaaaaatactattatttttcctcttcatagggtctattggtgtagctgttttaatataaagttgcgaagcatatatcgctccgtaatataaccatttcaagttgctaataatttttgttttgttttctactacttgtttttatttatttatttatttatttatttatttatttatttattttttaagatagggtctcactctgtcttgtgggctggagtgcagtgacacaatcttggctcactgcagcctccacctcccaagctccagtgattctcctacttgagcctcctgaatagctgtgactacaggcacacaccaccatgccttgctaatttttgtattttcagtagagacagagtttcgccatgttgcccaggctggtctcaaactcctgcgctcaagcgattcgcctgccttggcctcccaaagttctgggattgcagccatgagccactatgcccgctaataattttgaaggctgtttagcagctaacgaatgtgttcctcttgatctaacacttcaccagtgctagaaattttatatttgatttgtgatacagattctggtgtgtttttactttgtgtgttttgcagcaacaagaatatcttaggacatgagtgccctcccaagtagagtttgtgtggatatttaacttcaccaagttgctagttcagttagcacttcactgacaactgcagtggagtgaacagggaaacttaagctcttattcttagaggtatcttgaaaatgtccggtggtatcttctagccagttctctggttataccatttcagtgggggaatatatggggaatacatttgtcttcactccttcccatgctcttttttgcattggtttgaagacttttcatatttctgagaactctagtcatttcaaatattagttgataccacttcaatatgtgacttataacaaaaaaatagagaaagtatacatttggaatttacacaatctagaaacagtttactttaacataagcctgttctttcaacagattagttcatcagaatgccaaaaggcgttcttgatggctgttttaatttattaatatatattaaagtaagttttttggttagatttaactggttcaagaagggaaatcatgtattggttcaaaaataagaaaaaggcagattttagccttcttaggggtgggtgagagccaaggaaacagctgccttgttttaatttaaagaatttagaatatttttaaatttggactgtgtagacagtgagagttctgcagagaattaaacgaagtaatattcacttttgggggctttatctagactagaaggtatgttgaagtgaggaactattttgtttctaaaccgtaggtggaatctccctccccgcaaaaaaaaaaaaaaaaaaaagaaacaaaaaacaaaaaggatcactctcttggataaccattgtgcaatgatccaaatcaggaagctaacagcaacacattattttactagctaatatgtacaccttactcaggttctgtcaattgttccaatcatgtctttgtaggaaaagaaaacgtttccacattcagttgttatgtcttatgtgtttggctggtaccttagtctttgtcttttataacctttcagttttgagaactggttggttattttgtagaatgtcccagagtttgagcttctcttatggtttcatcatgattagattcgacgtatgcattttgggcagaaatctaccagaagtgatgctctgttttctgtgcatcgtatcaggagacatatgatgttggtatgtcttattacaaaagtgttgttttttttcttttgtaattaataaatattttatggggagatattctgaggctatgtgttttgttactcctcaaacttttacctacttttagcatccatttatgattcttgcctgaattaatcattactgtgatgattgccaaatggcgcttttctaattccaacatttcttttttactgattagttgggatctcctttaaggaagagctttcctttttatttacttgttcattccttcctttcttcattcattcacatgaggctggactcacggattctcattttattcagtgggttttagatagaattttacttgtattgatacccttgtaacttttttaacagatcatttgttgtgagagaaaccaataggctgtttccccaaattctaggggtgtgaactttgcactcagtggatcttttcttcgggatcttgttctgggtggaatcaatttgatggtggccctcactacttccagtcatacgtggcttaagaatgtgatggtttaggagcataatacatgggagatacttcctgctgtatttaaaagttaaaatgtggaagtttgatgtccggtccgaagggcgaggcacggacctccctggaccagagcaggttggtggccccgggcggcctcccgttggcggctctgggatagaaaccgcggcgcatttgtaagtgcttgcgcgtggttcctcctcgttgtcctgttgaagttgctcttggtctggaacgcgcgctagtcgttgtctttcagcactccgctttccacaccgcacgcttttcagttatgctttacatttctcctcgacttagatttcgtgagcaaaatgggcccatgttttattttttctcgtgcgtgggccgtcgtgaggctttaaacaggaaactgggacagcacccgggctccgctacccgtcaccgggccttccgcgcccctcgccccacgccgcgggtgcggtcctccctccagcagagggttccgggcgccggcgcggcccgcacggggccgggagcccttcctgccggccgggtgcgcgcggcgccgccgacagctgtttgccatcggcgccgctcccgcccgcgtcccggtgcgcgccccgcccccgccaacaaccgccgctctgattggcccggcgcttgtctcttctctccccgcagccaatcgcgccgggcgaggagctcctggtctggtacaatggggaagacaaccctgagatagcagctgcgattgaggaagagcgagccagcgcccggagcaagcggagctcccccaagagccggaaaggtaggagccccccggcccgcccgcccggccccggcgccacgcccgcccaggacgccgccctgccgccctcgctgctgctggcccgaccgcgaggcgggtcgcgggctcgggcggcggcgcccgcggcatctcggtgaccttttccggactcggccctgccccggccccgctcccgccctgcggtcccgctcgggccctgcgatcgctgccctcccgccctgccgacccggccccgctgctgaatcacggccgccgcgcgctcgggctgtttcttaacttgtgacttagctcctgggcggcagaaagtgcgcggacggcgttccggggccggacgttcccccgctggcaccccaagccgcgctccgcagccgcgcgcacggcgggcgcccgagctttctcgcggctagcttgacagccccggctccgcagactcgggcccgccgcgcaggacgcgggccgcgtcggtcgcggagtcggggtgtgggagtgggggaggcagagacagtgagagacagagacaggaggcggcggggagggcagggagactgcgggtgcggtgggcttccgaaaggatgcccagggggatgtggaagttagagagcgtgttgttttgtcgttttgactcaattctcatagttttacgacttctgatgatttcgaacaaaaggtaaagtgtagtcacacttaaaaagggaggggataatttctgggtaggaaaatagtttggttggctgtatcatatttccagtgggcatactgacacgttggggcttttttttttaatgaagaattttaatgtgaattggggaatagttcatagatcccagtttgaaaatatgccaaggcacagtatggttagtttcttattgatacaaatacaggtttgtgttttttgtttttttgtttttttgttttttttttgctctccttaggtcttaagtagatttctttttagtcatctgaacgaacgagtccatcctttatccagaacattgcaaagtgagttgtggaagtcatactgtaaataaaatcatatcgtaaactcgatttgggaaaatgttaaaatcggcattaaggaatgtaggcaagaagtctgttctgatttttcaagtatgtattctttgtatgtcaccacaaaatggaaatagaattaattcccccgtgaaacagttagtaggcctattactgaatatgcattgtctatttattgaatgtgatgtagtcactgcttcagagcattaaatgcttttgatcctgaatcagacgatcagagtctagaaaattcccagttttttttttttttaacttttaactgagttctgggattttattgctattaggcttagtgcttaactgtttgtagtgaaaactttttatgtaattcaacttgtttctttatttagtattcattttgtttataactaatgttaccagccttccgggtaagttatttgtagggggctggagatggggaggacagtaccctctttactgtgccactaatcataactaactcctgtacttaaatagatttgtagtttaatagcaaccttactttaacgcttttctctgtttggcatactttagtgtgcatgtttagaacatatgtcattactcttttgcttttttgtttatctgtttatttttctcttggttggatttggggaaaaacttgaacatatactttttgttttattagtgatatatgaacttaatagctgcatttttatacctgcgtagactgttggtgtttcgtattaaatagttcatatttcttattatcctattattttgtactactctgggcagcctataacccagaatcctaggttttaattaattaaaagacttatgtttatgcagagctctctgttggaacttacagtctgtttttaacagcttactggttaaagagacctatttgctctttaagacttaaactttggagagtttaagtaatgagtcaaaccttttttacttttaaattaaatactcagttaaaaccaatttatagcttgcaaagacctgaaatggagtctttttttttttttttaattaactcagttctgtttaggtcttatgtgtgacctcaaacatttaaataatatcttttcaggcagtgatgtcagagagtgaatcaacataaatgtcattcagaggcagtgttaacttagtattgctgaaagccgcatgttgaatacatagagccgacaggtagattgacagtgggcttgacttcattttcgttatgagacagagagaaaaacaaagggctgaattcttcatagttctggacctcagctcctttgcgtgacagctgctatacttacagctgtgcattgcatgtggtgcctttcagaattcatcagatcgctggtggatcataaggcgtgtttgggtagagcaaagccctgatttctttatatacaaagtagtggccccttctctctcccctcatcacctttcttctctcctcccctcccctcccctccccatattcattcattcatctaatgtttattgagcccctgctgtgtactaggcactctgctgggttgtagcacacagtgatgagcaaaaaagcagcggcgactcttcttatggcgccgacaaacgttaaatcagtaaatagctgatcagtgcctagacagttggcatgtagtaggccctcaataaatattcattgattggcaatgactcacacaaatgtgttaggaaggaaaagaatgcagtgctatgagaacacagttcatattgtctgcgaccttggagcgtgcatttttgccatgggccaaagatggatatacatcagcattttaaactggactttaatttggattcccagatttgtaattgagcttcactttttacatatctgagcagcctctgtaaaatggaaaataagttccttagatggaatagattaatctttcaggtagagagcaaggagggtttttagtgtcaggtgtttcaggctattttaatgtgaaccacagaaaaattataattataaaatagcatagaaacggtcaaatttagaagtatttctcatcttcttgatttctgtcccctgtttgttttggtgagaaatgagaaattgaatttgcttgttagcagtaagcaatgactgttggcaaatgctcttccagagtgtagattataatagcagagtgttttccctgctctctcagttacataagagccttaacctgaagttcttttacctggagaaacaacagtggctttctacaaatgggcttagtggaaggaatgaaaaagacgggatgcctgggcgtttaccaggtgtgcgatcttggacagctcatgtcacctttctgagatgaagtttccctagccttaaaaatgaatatcatcatatcgatgatgcttgtgccacctaacctcacaaagttgtcaagagcaagtgagataatagaaacatgctctgtgaagctgtgggctcttgggaactgtaagtaccactccttagaacatggctggcgtttacttccctgctacttgcggaggaactactgagttggtgactcatttaatcaatggggatttatggagcacctgtgtaagcccaaaataagcactgggtctcttctttccctcttccctcctacgtcacagcctcattctgtgctgattcacccttattttaggttctaacctattgacctcgctgttcacagcaaattaagagagaagagtttatagcggcaagaagtttttatacctgaaagctggatagtgaagaagacagaaagtttattacaaaatcggtaatgaattataaagaacaagttccttaaggtcagttagtaggttcagatagtccttcctaaaaaccgtcagtagtgcctgagaatatcagctatagcttataagtatttatctcagcgactcttagtcaccacagaacagttaaattataatcagcttagcaaagtaatattttatctgtctctacgatcagaattgtttaaattaaaaaccttggtactgtgacgacactcaagttttttgaaattgtacatatttgaaattcttctctaaaggtgcgaaataacaagcctttagaaacttaaaatatagggaggtaagacagccacatgcaaagataactcagtctaaggtagtctaaaaaaagtgcaacacggatggtataggcagtaaggactattgaccctccctaagagaaggaaaaagggatgctgagctgggctgggctggctagggagcctttatgtagaaagagtggcaggatggggatgtttcagaagagagagaggaaggaggaggacatcaagaggaaccttggggactgagaagttgtgactgtgtggatggtcttcccttctgttacttaacaagtattccttgcatctgtgtcaggcactattctgggtgctggagtttcagcaaagaactaaaatgacaagggtccctgttcacatggaatcacattctggagagtggggagtacaggccaacagatgaagtaggtaaaccttgtcatgtcagtagtgttttgcagggtgggtggaggaggtatggcctgactgtaggtgggagatcaggggtgaccattctgaggttgtgacataagtgacacaggaagttctaggggctgaggtctccaggaagagggacctagttctattagcagttctactcatgtagaaacctacatgagtatttttggattatgaaactcagttctgcaaatggacatatattggccctttttctgccaggcgctgcaccaagtggctgggttggttggtgggggagatgagagagatgactacagcaggcagcatcctcctccagtgcggagtctccagtccgtttcatgacagccacgcacaggtcagacttagtgggtgttctggttgatgtgggagagaaggaaaaggacactttccaaaattggataacttgtccaagatcaccctaccaatgagtgtcacagtcagaatttgaaccagttttcccatgccttttcttctacataatgtggagctttttgtccactcctacatgcagttgacaacaacagaagtgacagcattggttccatttaaagttgaacttagagaatacatttaataaaagcagagagtggacgggcttccgtggagtttgatctcctaacctttcgtagcagccagcagctctgtttcaggctctaagctgaatgacagaggcctggctgtggtgtctgaggatgatggtagatgggccctatgcctactgggtgcctggtgggcaggtcctgtgcccactgacttatagggcactggcctgtggttcctgtttgcaggtgctggagcaggatgtggagtgcttggacatggcagtattcctgtgtctggctttttgctggcaagcttgtggcatgagacacaaatgagctgtttctgggttggtcagtcttggaggggcctgtctctgctgtagctttctggctgcctcctagctgagggtgcctttgctgagcattgaatgtcccgtctctggtggttgcctgccaggatgaactctgctgctgttatggtggcggtctgtttttaaaagctcagtacggttttaattagtagtttttcaacagtaggagttcgggaattataaaaaatttgcagttctgctgctgctactgaattgctccaaatttagatgaaaatgttggtcagtattttcgttttgtgcctttgattcttatgtctatccttgtttacagggaaattatgtggattaacgtaaatttttcaaagcattttgcaaattttttagctgtattttagtgggtggatttgcaaaaatcctaacatatgccatgattaaaaagttttaaatatcataattgagtgtattgggaaccatgctgtgccctatttttaggtggttattttggttctcttgtccatatgtaaattggaaggtaagacttgcctaatacagaaataaagttcgattatgattaaattttctaaactatataaaagaggtaacaagatccttatagttagttcaaaatactttagttgatttttacaaatccacttataatttgaaagtaaaaaacctaatttcctgtgttttccttaaatatgaacactaggttatttttctaaatgatgaatttttattgtttttttttaaactcgttcagtgtttttttttccctagacaatttcatgttccagtttacagatagctgttacgacattcaaacctaatgttcgtgggagcattatagagaggagggtgtagttattttatttttcaataaaataacttttaaagtttatttattttgtagagacagggtctttctgtgttgcccaggttggactcgaactcctgagctcaagctgtctccctgccttagcctccctaatagctggtattacaggcttgtacagggtgtagctttgtatttaaagttgcctctaaagaattgaggaattggaggctgggcgcaatggctcacacctgtaatcccagcgctttgggaggctgaggcgggtggatcacaaggtcaggagatcgagaccatcctggctaacatggtgaaaccctgtctcttctaaaaaaaaaaaaaaaatacaaaaaaattagctgggcgtggtggcgggcgcctgtagtcccagctactccggaggctgaggcaggagaatggcgtgaacccgggaggcagagcttgtagtgagccgagattgcgccacagcactccagcctgggcaacagagcgagactccttctcaaaaaaaaaaaaaaaaagaattgagggcttggataaatatcccaagaacaccattgtggaggttaaaaatagacttttcttttagttaaatgttgtatggtgaactgaagctgaagtttcaggtagactggcatggtactttgttggcattcagatggcttgtttatatttcacatgctgccaagtacaggcctgaagttttattttgaccatccatctggctcagagtgttttattaatattcctaatttggttgaaatagtttagaggagctgaatgacatggagaaacaaaagttacttgaaaatgctattctctaagtgaaaaagagaaatactgcaagtagctgtttttctttttgccacccagattaaaccagttttcatacattacaagagttcttggatgaattcatttattacaatgtattttgatgtggacatatgtcatgacttgacacttatttgcacatcatgtcattatgccatgaattgctcacttctgttgatggtgacaatgacagcagttacactcgtttctagcattatgttggttgctctgtgtataccatagctaatcctcccaataatcctgcgaagttgagatccatatcctcatttgtagaagaggaaactgatgctccgaggggttatgtgctttggccgagttcacacaggtcctaaataaaaggctctgtctgtctaaatccagtttttatgcatgatgtttctaagtaggacagttatactgtataaattgcagtgttttatttgctttactaactagccaaggtgaattttcactgctcactgtaagaagtgcccactttaattctaaataccaagactatgattaagtgaagtgtttggtgtaggagagaccagtcatggtgacaccttcagctgtttttgctttggagatttatggattgcataggtatattgtattccttcaaacaccccaaatagtttttaaaaacacagattgcatttttactgctttctagctattgtctttcaagtgttttttaaatgacatatttgttggtttaagtttctaatgaatattttctttctcttaggttttatattattttggcattagttttgaaaccaaaagagcacagtaagacattgcttttgcctaactccctctgcagtgcagaggatcgagtttaggattatagagctctttcattttgtcttattgatgagaagctttagctgtcagctctgcagcactggtcttgtgttgagactgggttaacagtctggttgttccaccaataaaaatacacattttaaagttttcttaagctgaatgttatatagacaatgaacatgctttttaattaatgtgtagtctaaagattaattacagaaactgtaagtgcaattctgatttgtttgtggatataattgagttacatcatgcttgttagtcttttcagctttaggtggtgacattttgttttttatttgttttgccaaaatgtttatttgcagaggtggatagcttttttttttttttttttttttaactttcatttaagaggaatgcacatgaactatttgaagcagtaccttcctaagaggttttgtttgctgataaagctttcctattctagctgcttgactcataccagaggagaagcattaaagaagaccagaaggtgaaaagagtcaccctaacctatccatgtgtgctcttgaattttcctaaggaggggcacgcgttgatttcctcattgtctttatcccacaatagattcttagaatatgtatgtctatataaaatttttaaaactgcttgagtttgtagccaaatgtaatgtggctttttctacttggaacttttactgagagtactttatttgattgttaagacttagtaagtcgtagccaggcgcggtggctcacacctgtaatcccagcactttgagaggcagaggtgggtggatcgcctgaggtcaggagtttgagaacagcctggacaacatggtaaaaccccgtctctactaaaaatacaaaaattagctgggcgtggtggtggctggagcctgtaatactagctactcgggaggctgaggcacaagaatcgcttgaacttgggaggcggaggttgcagtgagccgagatcgcaccactgcactccagcctgggcagcagagtgagactttgtctcaaaaaaaaaaaaaaaaaaagtaagtagttaacacccgccccaaccacccaaacatactgtaggcaaggcagaactacagtttgtaatctatgctttcaattttcaaaggtctttagcatttttctttctgttctaacctgttctctgaaaaataggagaaggtaactttgtttaaaaggttaaaacttggtgcgtatattaagaaaatatcctaagggattctgggtaagagactagaaaattctcagtgttctggagcatttattgtagctgcttgctattcctgcttctgtggccatgatcctgaaatttaaaaatattttgatgaaagttttaataatctagtcaacgtgtagttattttagatgcttatatattaaaagtacataccattttttatttttaatagactatttgaatagtttcagaggcaagagatttattctaatgaataagataatgatactgtgtgtgtggtatataaaaataacagtttataagataagaatataacatctaaaatactgctaatttgatacttttcatgactttcaattttatatgttcttgttagtttaatcagtgtctgaatgatgaaaaactaatttcactcttagtgaattagctgtctgttaccagttatggagagtagcaaaggattggccggttaaaaagaaaactaattcagcattgcttaggctaaaattcccctaccctttttttttttttttttaaatgaaaactacagcgataaacaatcttttttcttgtatttataaacctacctcttggggcagtcttttgtagatttcctgaaacaccacatgccagaaaaatgaaggcaaactggtttgttcacccatgtttagaaccccaagacggaattatgtgcaatgtttgaagttgcaatgccgtttagaatgggcaacaatgcagtttctgagccttttgttattctttttaccatttggcctctcaggttcagttttcattctgttgccagtttgagatgtaggatatgcctttctggttctgttggctacatttttgtctttcatgtttgggattatcagagcctgcttctctggaataaagagattactggccataagcagaatgtctaagggcctgtgagaaatgagagttcctactgtccacctcttgtcttggtgcttttgccatgacgatgttaatgttggtcatagctgggtcccaagtcttctaatcttctgtagcaggtttacgctgtgggcagcaccatgatgataatagttgtagttttgatcttttatatgtggaacaatctccttgactgtttacacacgatggactgtaatttttgtaggattagcactaatgttgaaattataatttccctttgatatccaagaaaataaggaaaaagtatcaataataataataaatatcatatgttgtcagtggtctcaatcttggatttttggaccaggggtttaagattccaaatctacttgattttaggaattttgttaattgctaaaggtgtgatccacagtgtccttcccttgttaggtgggtcatgggcttgtttgataagatcaaatttgagtggtaagcttaatacctatttttagttattataaatccaggaattcaggatagaagataatgtaaattactgtttgtatgccaagataaaatttggggttgtagtagagtgcagaaaatattaaatcaagaaaaagtgatacttactcaatttctgtctgacccttttaagttttaaagacaggatcctataaatctcatgggtgattgtcagaaagtacatggaattggtgaactttgttttcatagcaaatgattcttgtgcttccccctaccttcagtttctatgctaagcacattaaaaaaaaaacctgcctaaaaattttttttagtgggtgggaatatactgcttgggcttcagtgttgcttttgcattagatgcagattgatcagtactttgaaaatggatagcttgtttaaaatgagcctggagtgtgcgtgtatgttggctggaggggagagggggaaagttgctgacccagctataccttgagtgttaggagatgtgcagcatgcagaatttattgtgatacaccagaacatagctttggaattaagagaccagattcacataccagctgcaccagttaattgcattgtgacttcggatgggttactctccatgttttggtccttaatttttctgtctataaaatgggaatatgagctacctaccctacaaggttgctgtgagcattaagtgagaacattataggaacattcctggcacaccaacctttggttcatcccattgtaatggtgggcaccagcaaaatacattctgtggtaactgccgttctctggccggttggcacacttctaaaaaaaaaaaaaaatgagcagtttcaccatcttgtgtaacaagttctcttaaaatccatatattttccttttgcatcgtggagtgaattaagtgggtttcaaattagttaagagtaaagggcctgtttggatctgcacctaaatagctacatcgtggcactaaggaattcttcatgtgcaagaaacctgcttctctcttaaaagctgtcttgtttcactgttaaccaaacgaggacacctgtggtgacataggttggtgcattaggtaactcttggaatttgatttgttccatttgcctgggcagaagcaaacacgtctcactgtttgctcgtcttacctttatgtggtccaaagcactcatgacagttataagaggattttatgtgaatgaatttttcttaacattttcttaggtattaaattatcagacagccctgaaagtaattgtgtgggagcagtttcagggctgtatatgacaaatttttttttacagtctttctgggtgtgaaatcaggaaaaaaacaaatggacgaaaggacagttttcttagaaggtgctaattaatttgacgataccagttttccgggaagaaatgtcccgatgatctgtgcagcatcttgactgggctttctgaggagttggagttctttttcagcagtcgcacaggtacattccttctgttgatacacaatgcttgtacaaactcacagcttaactttgtaataacacaggagtccctgacccccagtgttgtctaccaaatgttgtgtttacgtccgtttgtgactggggagaagggccttaggtgttacttgatactcagaagtctcctctccgaaagattaagaaccaccacagtgaaccagtatgttcagttttcaaactcaagcagagacagttaggagcaataaaatcagtaggttacagactttaaaaatgaaatacactcacagcttacactgttagagcattagtatatactgatgtggacatgagtgagtgagtgacagaattctctctaacttctgtcttcattggacttgtacatttttataataatatctgggtgggatcctgtgaatcagcggagaacaaatgaacaaaacaaatggatgaattaggaattgttagtggaagcagaacgccattgtcttcatatgaaggaacatatgccgacaatttagatttgtaggcgtgcactttctgtaatttgtttagtagcatctgtggatactccttacaatcgattccatttattgagtctgtgccaggcactgtgtggcattcgttttgtgcattacctcatttacttctctttgacaacagtatccgatcagtattaccagtatatatcagagctggttcccatctgcctcgaatgggattatttcttgttaatcaaatcatggcccaagggctgcgcagcagtgtttcatgctatttcacttttatgggtatctgtttttgtggaccaaacttaccttgaggacctactattgtgagtgccaccaccacactggggaaggggacaagagcctagcccactgtctcgcctcagttagcgtcagctctttgcagggagcacgagtaaccttggagacacaggaacctgctgggagcaggtgaaatgagtgcataggttgagagaccctttccaccagccattggacgctggcctaggaaggactcctgtttcaagccctagtcctctgtgagccttcctcccaggctcagtttgttccctgtggtcattactttacccctatattggcaaaaaatagaaaagcctcagctcaaggacaatgtgggataatccttggagaccagcaccaaggaagattgtgtgcttctgaaaggctccattctcagtgccagagcctgttagcaaggccaggtccacagcgcgcgctcctcaggcttcccggctttacctggctcccttggtggatggaactttacatcctcccctgcgattatgtggatgatgtgtcggtccgtgagtgctcatagaggcacagctgcaggcaggaggtggctggggcacagttgagatcctccacagcagtgggatctgtttgatcagcagcagtggagctgagtctgaaaacctgtgctggaataaaagtgcctcatttcatggtgggccgagtgattaggtagcttagtatctctgtaaatgctcttgtttttataaacctctgctaaaatgtggcatattcaaatgccgttgcttagtctttgcatttttaagagaagcaaaataaaggctgaggtaaagaatgatgatcacagccaactgccaagacatcgacccttaggttaatactggcaggcattcaacatgattgtttaaattagatatttgatttaaataatgatgggtataagaaccaagtgcggtgaacaggaaaaagaatatggggtatgtggctgtttggaaagaggaaacagatgatttttttgtttgaagtgatgatgtgtagcatggaattgaaagatgtctaccaaaaggttaacagggtaatttgaatgctaagcatttttggctatttaatggtatctcttgtatttttaatccctttaaagtctttataactgtgtgtccattgtgggtttgatgttactggggattgtggtttttttcctgaacggttttcctgagttttatgggtaggcagtagacaagagagaaacacttgagcagtactttttgccatctaggccaagtacaaagtagaggctttttccaaatagcacttgtaaaactgcgtattttacaaaattttaaagtgttatattttgtctcaaccaataaaaacattttcaattatctcattgtttttacttttgttggcgtcttctttatgaaaaatcatgtattcatttttttgtgtgtaatgtaaccaagtgctcatctgagaaaatacaatcagatagaaatatcatacccttatcaatactctctcactgggagccacctgccaaaatctgaatgtatatcctcttgattttccttaaatttatctctgtggatatatcgtagcctgatttgattaattagtcatgtggcttgaccattgttcatatgggcatttctgtaaccaaatgtgaagaatgaattttgagtgttttcattgtatcttgtttcatatttatgtcaaatttttactccttgaaaatattttaaaacgatgttgtagttaattcatcaggatgcagtattgtaaaatttgtcatgggctttaaagggggaaacatgattttcttcttagctgagagtaagcaattctcgagggcgtggctgtctcttctgttttcagggttgccaggtactggaaatgcacctcctctacaacacctcccactttggttttttcagccacggggggctgagtccataagttgaattaggttctttattttgtagttgcctcgtcactatttatatgtaaggttttcagattttaggtacatttttcaggctactaaaaaaacgtgagaaagaaacctagaaattgattatgaagtagaacaggtcagcatcttgtttatatttaattattctcccaaatcattttgttcatgccacaacactttttgaggctccaaagaaggtaaggaaacttaatgctttcttatcttgaatttggtgaagtttgtttgggaagccctttcttaagatgtggaattatccagtcaaaaccactgaaagcctttttctgacagcataaaagctcggactcccttccgatggatctttgctattctcctatcagcctgacatttggaagagttagggtagcctgcagcctccacagctgcagaggctgtgcaacagcccccctggtgggaagcaagcatttcaggaatttatactgcaatctgcagaactgcaaaatctaaaacttttccattgtttctgttggaagcaaaacctagagttgtgttttaataccatgagctacctaaaaccagagaggttttatttttataatttgcctccaggattacagatagttcttggtgactttaactgcagaaaaagatttgaaattatgccaaacgagcttaacagaattttttactgtcagataagtttcaaagttattttaagtgaaaaaggaaactatagaaaatgcatggcatgttaacttttataaaaactaactgttgcagtgtcttactacttcagatctatggggcttgctttgccactgatcgcgccttgaccagttgtaacagccacttgtgatcctctgataaccacacccaccccgctgcaaacctttctgaaagcatttctggttgaggcacactggtgcccccatcagtccttctgcccaagtctcccagttcttttgttaatgacatttgatgacttccagagtaccaagtcattctcttacattaaagcatacattaagaatattgaaatgaactgttaattccttatggaaaacttaattttaggtatccatttccagcttctctcttcctctctatcatcaacccaactgtagaacgttaaactactaggcacatatgcagcagagctgaggtctaattccagtcgaccttcaccatctcacacatagcatcacttggctattcttttgtttttttttttgagatggagtctcgctctgtcacccaggctggagtgcagtggcgggatctaggctcactgcagcctccgcctcctgggttcaagcgattatcctgtctcagcctcctgagtagctggaattacaggcgcggtggtaccgcgcctggctaatttttgtatttttagtagagatgggatttcaccgtgttggtcagtctggtctcgagctcctgacctcgtgttctgcctgcctcggcctcccaaagtgttgggattacaggcgtgagccaccgcacctggcctgcacttggccattcttaagataacaactttgccattatccatcgattcctcttccttaccaacacaatctattacagattgtaatttttaaaaattttataggagtcatttaacatgtactttatacttttctcctcccagttaagccttttcatcttgctttgagaactctaactttactccaaaccagatgtatcctgagtgatactagtgccacagctggcctgctgtcacgaaagacacctttgactttgaaaaatttgaaaggctgtatattataatgcattgctcattcttacctgaagtgcaggtgacggagatgaccttcaaggctctttttgctccagagtgttctggttcttctctcagccttgagcatagtgagttcaacatctaccctgttccctagggtctgtgccctcagcttagtcatatgcttttgtcaaagcctttcttcaacctagtgtgaaagcatggttccagtcttcagtttcctaggaagggccctcttatgtaggggcaggaagaagaggaagactctgcaaaagggtgagattctagatagtagtgtcttaaggctgggacgaggaattctaagaatgaaagaaataccaagttgtcaaatgtgaaggagaaacttggggcaaataaagcctgaagaactgttgggttttgtaattatggtattagtgatagccatgggaattggatgcctgtagagtagagagggtggaaattcagttgcaaggatgaaggactgatggagggcagaggaactggaggcagcaggcacaacccaccttggtgagttggtatcagccctgttgggaagcccgtgtcctcgatgaccattcatggtacagctgtggaaatctcccagttggagtcttgtctgctttggaaccaactgtgaagctccccaagtgaagatcggatggacctaacttctgtgcacagatatttaattctgattttatccttcagagttggatagctccccagtgaggaggcagcacatctagagttacatatagttttaaatttaattcatttaaatcaccaaatgcatgagccttcactgttgtgatgaatttttaatgtaacttgagcaaggctcccagaattttgcattctctctactgcctgaacattttaaggtgaaacattattctctagaatttcctactgtgtctgtccaatttattaggctagtagaacatagtccagacctaggttaaatttttcatgtgacgctttaggcaattttaattttgtaactcatatcccaggcatcagtggtataatgctatacatagtcttagaaaatagtcattatggctgttgaatgtctttgtatggtaactatttcactacaaaatccagttttattgatattactcagtggtgaatcatacttgttcagatcagggttctgtgctgttgacttgtttctggcacaggataaaatagaaataaaaaaaagcattccaatttgattgttgcttttttttttttaaactataaatgcagtttaagtctttgttttgtttttgagacagtctgtcgcccaggctggagtgcagtggcacgatcatggctcactgcagccatgaccttctgaggtcgagtgatcctcccacctcagcctcccaagtagctggcaccacaggcatacaccaccacgcacagctaattttttctatttttttttttttttttggtagatacgggggtctcactatgttgccaaggctggtcttgagcccctaagcttaagcaatctgcctaccttggcctcccaaagtgctagaattacaggcatgagccactgtgcctggccgatgcaagtctttatgcaacttttttcacttgcacttgaaaccagtgaaataatggatctgtagagtgctttgtaaagtaaggtatgctgctggatgccgtgactacatctgtaatcccagcacttttgagaggccaaggcaagaggattgctgagcccaggagttcgagaccagcctggacaacagcaagatcttgtctctacaaaaaagaaacaaaatttagtcaggcatggtatcacatgcctgtagtttcagctacataggaggctgaggcaggagggatcacctgagcccaggaggtcgaggctgcagtgaatcgagatcatgccatcgcactctagcctgaatgacagagtgagagacagagtaagaccctgtctcaaaagaaaaagtatgcatattaagtcattattgatattaagaagtaactattaagagaaagaacatttttaacattttgtccttgagtttttttttttttttttttttgagacggagtctcgctctgttgcccaggctggagtccggtggcgtgatctcggctcactgcaagctccacctcccgggttcacgccattctcctgcctcagcctcccaagtagctgggactatactacaggcgcccaccaccacgcccggctaatgcttttatgtttttagcagagacggggtttcaccgcactagccaggatggtctcgatctcctgacctcgtgatctgcccaccttagcctcccaaagtgctgggattacaggcgtgagccaccgcgcccggccttctttttttttttaagatggagttttgcccttgtcattcaggctggaatgcagtggcacgatctcggctcactgcagtctccacctcccgggttcaagtgattctcctgcctcagcctcccaagtagctgggattacaggtgccctccaccatggctggctaatttttgtatttttagtagagatggggtttcacccaccatgttggccaggctggtctcgaactcctaacctcaggtgatccacctgcctcggcctcccaaagtgctgggattacaggtgtgacccactgctcctggcccttgagttttcattctggctttacagctactgtagtcgtgtgtcattgggcaagttatttcacatctctgccctttgggtgtctaccttgtaaagtgatttatgcgttgggactttgggggcttctagcaaaattgatccattaagtggcaggggcatcagttttacaataagggcgcacagtacaggcccaagaatgaatatactacattggtcttattctcagcaactaagtacacagttaaacattatttttggcatgtgagcaccttgatgcagtagataactgctgttttccttctgttgtattcaatttctcatcttgatgtattcatttcttttcctcatgcacatagtgttgtcctgtccctctgctgttccttgtcatcatttccatttcacttcccttgtgtttcattcctctttcttgtctagaccaagcggagcagccagctggcagtagcgccctgtaggacccccaggacccgatggtaagtgcacttgtgtgcttgccaggcctcccagcggctcctgctcctctgcctcacagagagaagctcacaaatgccatctcccctctgtaaatgtccttatgggtttggttttttcttttaatttgatgacatataggacagaaatcaggtgtcagaagaaatcagtactggtttaaggaaatgtagcaggttccaccgcctgttgctgcaatatttggcggttgtgagggacaccaagcctgtgtatgtgtgggcaggacccctggttctgctttctgttctgccataggctaattacttcccctctggcgctggccttcactttctcccacaaaattgaaggcaggacaggtgatttcaatagccccttcatctctagtccaaggccctcacgatgagacgtaacttaactgatggttctcatgaagattgagaacattgttccaggtgtcagataatctcaattccatggatgaatgatatagacttgtgatagactcatttccttgataaactaagtgtgttggtattcaccaaatttagtttggtggtaaatttagttcttcatctctccatttttagaattggcttattagtgttattcaagtactttttgtagtttttaatacatgtatagaccgtcgagtgtgatccagaaatgcattgatctagtccagtggttcttaacctggggaaatcttctccccaggggacatctggccatgtctagagactttggattgtcacaattagaagggggggtgccactagcatctagtaaatagtggctacaggtgcagttaaacatcttccagtgcatcagacagcccaccccacagccaaggatgatctggcccagatgtcgttcatgctgcggttgaggcgccttggtaccctgtagtggtctgtggcgggatcccctccttagtcctctgataagatactggagatgtacctactgcaaatggcttctcctcacagtggattgggtttccagggtcatggcttttaaagaggacacctggagagagaaaagggagttctcgctgattaggttttgtttgtccaataaaggacatttgacatttagtatcagctaggtgctctaacattcttttaggtagggaataaaacttaaaatagcacttatgttttagacagttatgtgatttcattttgagtgcatcttaatggtattaagattgtacttccttttgttaagatataaatctagacattttacttatttaatactctatttacatgtagaacagtgtacttggctttttatatgacctacagactgggtttgtacaacacttgggaggttgtagaaaaatctttgcatttttttttgcaagtgactgtattacaagaaattgacatcggtttttctattaaattttacactgtggcccttctttaaatgtgtgtgaggtttatgcaaggagtgaaggtttagattacacctctccattttaatttattttaaaagctcatactaagtaagtactaagtaaatgatcagtaaaaaaaggccacattccttggcctgtttggggttacctgaggggtatgtcttataaaaatgtcattgtttgggttcagagaaaaagtttctgaatatgatttttgaatctgtgggctacaccaggaactctctcttcacatggtaataaaagaagccgtgaatttcctcacacatcagttgcagcacagagaagttatgttatgtcagtagtcattatatttgcattatggatgtgggtgggcgataagcattttgtttgctctcagtaatctaatacgggctgagcatcacacacaggcagaactagcttatgtcataagcataagaaaactgatggaaaggaggtagaatccaaattcccttaaacaaaactggatccctgaagaacctttgtcattatctgatttagacaaaatgctgttaagttgacaaagggagaaagagtcacaagaggacgttatgcctgtggaaaggtgcttagatgtttgtgccccttatggaggggattggcttataattcttcacctggagacgtgtgttggtcatctccatgcagatccttcactcttgttatcaccagagtgtggtcccggtgaagtgtgtgctcgttttttgagttccattttaagtgcctttggaaatgaatggatagacaggctatcaggaatttatttgctcaaaccctgataaacgtagtggcaaaaacatcggatttcctatgggctgaagaattaggtatgtaggccgggcacggtggctcatgcctgtaatcccagcactctgggaggccgaggcaggcggatcatgaggtcaggagatcgagaccatcctggctaagatggtgaaaccccgtctctactaaaatacgaaaaattagccgggcgtgttggcgggcgcctgtagtcccagctactcgggaggctgaggcaggagaatggcatgaacccgggaggcggagcttgcagtgagccaagattgtgccactgcactccagcctgggcgacagagtgagactccatctcaaaaacaaagaaaaaaaaaggtgtttaaaatggtattttagaatttacgttttaagactaacaagcaaaatgactgttaaggttatgtctcaaatttttgtcaaaatctggtggtgttttttaggatttgtttttgctttgtattgtatttgatgtttctacttttaatctagatgttttcaatgatgctattttatgtctctgacctcatttttgtctgtttacatttttagctaattatgcttcccggtagtgattctctgttatggagtatgtaactttacgtgtatatagcagctttaagtcgtttttagtttgattttactaatgcagagataaaaggtgtcagaggcttgtagttctggaagctggtggaggtttgtctgggggagagcagcggagaaaaaggaggattgttacggaagaatggggatctgtctggatctgaagactgaaacaccagcttccagaaaaatagaaatctggtaattaaaaaatgtaaaagaaaggttgcaaattctggttaaatcctaaagaaactgggcttctgacttcttcagtattattactcctatagataattgtttcttatcttcatgactttagttccgttgttccaacttatgagaacgatgttgcaatttaatcttaccttgtaaacgtatggtatcacttggaatgcagtcagtgtttctgaattccatcctctgaattgttaatgaaatattgacctggactggacctacagtcagatcccttagggctctcagagtgccatgctggtggacagtgaattattcataattactctgcatttggtatttgagccattgtgaatgtgtatcttttgaaattccgcagaatctctgcttctcttgttttgcttccaacaattatggataatcatgtcttagctaaaagggccccaagttataacatactgtttttctctaatatgcttcttacaaatagccaatccctattagctgtgtggcattgaaattcaatgctattactaattttcctttgacatcaatagtaacgttacctcataatttgatagtcattatagctatgaagggaactaatgcccaagattctcaaaaatgcaagattgatgtgtttctttcttttcccctctgtcataatttacctatataacagagtatttacagtcatcattcattcctttctttaggaatccaaagtggtaattgcccaggaatatacagtgttcttgattggattaataattatcttcagtaattcagaataacacatgagggaatgaatgaatgaataaataaaaaaaaaatgaatgaataaattaaaaaaaattgtgtttcagggaagaaaaaatcccaggaaaataaaaacaaaggaaacaaaatccaagacatacaactgaagacaagtgagccagatttcacctctgcaaatatgagagattctgcagaaggtaagcttgtgatattggcttggtctgaattgggtgtgtatgtacccagtgaatttaactttgtatctctttatattgtccttctgagaatcatttaggatctttacgaggttaaacagcaaaaaagctgcctaaatttaatgtggtaagctgagccttctatatgctaccttcccttcaaacaattgtgaaagacttttcttcttaaaaatgaacttgttcctttgttaaaataaaatgagaccaggtgtggtggctcacacctgtaatcccagcactttgggaggctgagccagaaggatctctggaggccaggagtttgaggccagcccgggcaacatagtgagaccctgtttctacaaaagaaaataagaaaattcactaagatgatggcatgtgcctgtagttctagctacttgacaggctgaggtgggaggatcactggtgcccaggagttagaggctacattgagctgtgatccccccactgtactccagcctgggtgacagggcgagactgtctctaaaaaaataaaaataatgataataaaatgaaacatatgattgcatttaaaaatagcatgaagttcaaaaccatcaaaaaatagtgatagcaaggacatgaggaggcacctggggtgctcgctgttttctattattcatctgtggaatggtcacatgggtatatatatttagtgaaaattttatcttgctatatactcaactatttgtacactttaatacatgtacgttttatacttcaaattaagcatttacttacaatgtcagagactttgatttttgtataacagaacaaaaagtatacagaatgaagtgtgtttctgttttttgttggaatttaaattcttattttgtctcttcgtgtttgtccccttaaaattttctcctttatagtccctctggtgataatattctaggcctgccacgacgtaagaatccaaccaagaggcatggattgaaagttaatcagaaagacagcttgccctctgctcattgcagttgggccaccatattgagactattgatacagaagggaaggaggtgtgtcttaatttgccatgggcaaatttttgcagattgcagcttacttgagttgtttatagtgagccaagtaggcaaatttcagaagacaggtttgtgactcttttaagaaatatttgtagaggaaaataaccagaatattttggatgcctttcataaccatttttaagcactgtttgtgatgataacattcataaaagatataattttctgtgaaacaagaatagtcaagttcatttcccagagtcttaagactaagttctgcctcctcattgcaggtgtgccgagagttttttttgaacaacaaaaattactaaggaacctcactacctttggcggtagaattagaaaacagattcagcagtcacctactccccttcagtaattcgagacaattatttttctcctgacacaacatcaggtcccatgaaaaatgacacttgctggcctggcgcggtggctcacgcctgtaatcccagcactttgggaggccgaggcgggtggatcacaaggtcaggagatcgagactatcctggctaacatggtgaaaccccgtctctactaaaaatacaaaaaaattagccaggcgtggtggtgggcgcctgtagtccgggaggctgaggcaggaaaatggtgtgaacccaggaggcggagcttgcagtgagccgagatcgtgccactgcactccagcctgggcgacagagcgagactccgtctcaaaaaaaaaaaaaaaagaaaaatgacacttgctcttcaccccccagtatttggcacagctggtcaaagtggtgtcgtaggcttccgctgaatgttctgcgttgtcctcagcaaatggtctataccatgagcaaacagttcagactcttctttgtgctcccaaacctccctttatgttcaaaactccagagaccacataaagtgcgtggatccactctggcatgggccgtgcttgttaatggagctgtgcagacttcggtttatgttactttggacagttttatatctgggattgtttaccagtcatggggaaagacattttttccccatcaaaagaagccacagattttgactgaaaataaagtctgttaggaaatttctgagccttagagttggcgttttctgttgtctcatttcaactcttttggcagtattcggggtctctattgaaaatatctttgaaaagagaggtagctcctaatttgaaatatgttactactgtcgaatgactggtttcccactttgtggaaagctcatggaatttatgaaattagtctagggggagagaaggctgtttctgtttggaaacagaaacctcattgctagtaaatggagtagcagatgggaaacagtaattcccgatattcctgggaaacagcaaggaggctaggactgaataagtgagcttgtatgagtaatacttggcattgacctcttccccactgtatccacgcagtccccatgtccagtagcaggcctctcagatcgtgagggtctggctgctcttttctgcctccactgcctcttcccctttccttcttagcacagcagccagcatctccattctcattctgctctgccagtcttgctcctcggcctccagtgatgaccttcccccatcccttcacccaccctgcagccgaatctcccagatggcagtctcctgctttcagataccttcagtggctccccactgtccccagataagtccacattaatttacagtgttctctatgttttgactcttttctgcttgcttttcctcttctgtccttaattcttgtattcttcaggttctgtctgcttagtcctttctctaagaagcctttcctgattaatcaaacccatatgagatgcttccgtaccacactcacttccataaacacagccatcaatgttctacagtttcgttgccttcctgcttgtgtgtggcttgtattaaagtgaagctctctatgggtaaggatcgtgacagtcttgtttacctagtactggcagatagtgggtgctaagtcagtatttgcaagtgattgggggaacagccaggtaatgtagcctggagaagaagtcagaatagctctgcctcctccgtggaacctttcttaactctcctagtgcctgcagtagaggggtccgcttctgcagtgcagcaagtgggactgtcgcgacagcagcattggggaccattcctactagcacgaaaccgcgattacagcttccgtctttaagaatcccctcttgtccctgtgttttcttccagtctcttctccatttctttttctttacaggtaaacttgaaagagttgctaatagtctccctgtctctccatctccttccattctcttaggaactctgttagacatttgtccccactactccacttgctgtcacaatcacaagacctctgccttggcagatggaatgttccattctcagtcctcattttatccaacccatcaggagttctggacacagctgatcatgccctccttgaagcagtttctttactttgccaaaggaccaccactctcttggttctctggatacctcactggcctttcccccagcctcagtcgtggagtcatctgggacacaatcctctcatccctcttctgcctgcgttcacttgccaggtgacctcatccagtccagtgctctaaataccttctctggccttctctaggactttgaaatttctaggccagcctctttgttgaattccagattcatataaagctgtctacttaatatatttacttggatgtctataatcaggtaccttaaactttagcacgtctgaagtaagctcttgatttcccccacaacacgcacatgcacacagaccacagttgcttctcttgtggtcttccaacgttttattagccaggattattgcagttgcgtggaatctcctcttctctctcaccacagccagtcagcaggcatgttgtcaacttcattgacaaaatatatccagagcacttgtagtcccgccctgctgccacccctgtgccaccatcctgcctctcctggaggatgcattgggccccatctttccatctgcctccacccttgtcacctagggttcactatcttccttgtagtaaccagagtgattctcttgaatacaagtcagattatatatttccgttagatctttctggtagctccctgttttcactcaagagtaaaagccagcagcctgcaggggcttgtgtaagtaggcccctgtttgcatctctagtcttacctcctgccctcactttgcccagcttccccacctcacctcactgatgtctttgctgttctttgaatgcatctagtatgttcttgactcagcgcttatgcattttgagggttcctctatccagtagggctcctcctcccacccccccccccaatatttgcatgcctcattttccttaggtctctcctccactgtcaccttctaagcaagtccttccctgactgccttctaccacccacctcaggtgggctaggcctagggactccgaagtgactgcagatttctgttcccttcagtgagatgctcctgagttcttaataacttggctaggcttagaagagatgatctccaaagattgtctagcttgaaaaacttgtgattacatgattctggaaaatgttctagcttctgagaataacattttatttaagagggagagaggatcatttactccagacagacttccaaggatctaacctggtgatatgtctggtaaagaactgtttccagtttggaatcatgagaaattagaatttacaactactcctaaaatgtagtagtgactactccaacacgattttaaacactacagtttctgtcaacagagttgtatctgtgtgcaactaaacacaaatccccagctccacacggacatccttgtctgttgcgctcgtgtgtgtcctcactgccgggaatattgcctggtacgtggctggtaccctaaatacttgttgaatgaagtggattcatatccaatacaactttgtcaattaagtatataaagtagaagtaatttattgttcatcatcatctcccttatgttttaggtggtaagagaaataacttgaatcattcagattgttcaccaagtagctggtttcccatgcttcacttccatgcttctgcttccatgtgctttctaggtcctaaagaagacgaagagaagccttcagcctcagcacttgagcagccggccaccctccaggaggtggccagtcaggaggtgcctccagaactagcaacccctgcccctgcctgggagccacagccagaaccagacgagcgattagaagcggcagcttgtgaggtgaatgatttgggggaagaggaggaggaggaagaggaggaggatgaagaagaagaagaagatgatgatgatgatgagttggaagacgagggggaagaagaagccagcatgccaaatgaaaattctgtgaaagagccagaaatacggtgtgatgagaagccagaagatttattagaggaaccaaaaacaacttcagaagaaactcttgaagactgctcagaggtaacacctgccatgcaaatccccagaactaaagaagaggccaatggtgatgtatttgaaacgtttatgtttccgtgtcaacattgtgaaaggaagtttacaaccaaacaggggcttgagcgtcacatgcatatccatatatccaccgtcaatcatgctttcaaatgcaagtactgtgggaaagcctttggcacacagattaaccggcggcgacatgagcggcgccatgaagcagggttaaagcggaaacccagccaaacactacagccgtcagaggatctggctgatggcaaagcatctggagaaaacgttgcttcaaaagatgattcgagtcctcccagtcttgggccagactgtctgatcatgaattcagagaaggcttcccaagacacaataaattcttctgtcgtagaagagaatggggaagttaaagaacttcatccgtgcaaatattgtaaaaaggtttttggaactcatactaatatgagacggcatcagcgtagagttcacgaacgtcatctgattcccaaaggtgtacggcgaaaaggaggccttgaagagccccagcctccagcagaacaggcccaggccacccagaacgtgtatgtaccaagcacagagccggaggaggaaggggaagcagatgatgtgtacatcatggacatttctagcaatatctctgaaaacttaaattactatattgatggtaaaattcaaactaataacaacactagtaactgtgatgtgattgagatggagtctgcttcggcagatttgtatggtataaattgtctgctcactccagttacagtggaaattactcaaaatataaagaccacacaggtccctgtaacagaagatcttcctaaagagcctttgggcagcacaaatagtgaggccaagaagcggagaactgcgagcccacctgcactgcccaaaattaaggccgaaacagactctgaccccatggtcccctcttgctctttaagtcttcctcttagcatatcaacaacagaggcagtgtctttccacaaagagaaaagtgtttatttgtcatcaaagctcaaacaacttcttcaaacccaagataaactaactcctgcagggatttcagcaactgaaatagctaaattaggtcctgtttgtgtgtctgctcctgcatcaatgttgcctgtgacctcaagtaggtttaagaggcggaccagctctcctcccagttctccacagcacagtcctgcccttcgagactttggaaagccaagtgatgggaaagcagcatggaccgatgccgggctgacttccaaaaaatccaaattagaaagtcacagcgactcaccagcatggagtttgtctgggagagatgagagagaaactgtgagccctccatgctttgatgaatataaaatgtctaaagagtggacagctagttctgcttttagcagtgtgtgcaaccagcagccactggatttatccagcggtgtcaaacagaaggctgagggtacaggcaagactccagtccagtgggaatctgtcttagatctcagtgtgcataaaaagcattgtagtgactctgaaggcaaggaattcaaagaaagtcattcagtgcagcctacgtgtagtgctgtaaagaaaaggaaaccaaccacctgcatgctgcagaaggttcttctcaatgaatataatggcatcgatttacctgtagaaaaccctgcagatgggaccaggagcccaagtccttgtaaatccctagaagctcagccagatcctgacctcggtccgggctctggtttccctgcccctactgttgagtccacacctgatgtttgtccttcatcacctgccctgcagacaccctccctttcatccggtcagctgcctcctctcttgatccccacagatccctcttcccctccaccctgtcccccggtattaactgttgccactccgccccctcccctccttcctaccgtacctcttccagccccctcttccagtgcatctccacacccatgcccctctccactctcaaatgccaccgcacagtccccacttccaattctgtccccaacagtgtccccctctccctctcccattcctcccgtggagcccctgatgtctgccgcctcacccgggcctccaacactttcttcttcctcctcttcatcttcctcctcctcttcgttttcttcttcatcttcctcctcttctccttctccacctcctctctccgcaatatcatctgttgtttcctctggtgataatctggaggcttctctccccatgatatctttcaaacaggaggaattagagaatgaaggtctgaaacccagggaagagccccagtctgctgctgaacaggatgttgttgttcaggaaacattcaacaaaaactttgtttgcaacgtctgtgaatcaccttttctttccattaaagatctaaccaaacatttatctattcatgctgaagaatggcccttcaaatgtgaattttgtgtgcagctttttaaggataaaacggacttgtcagaacatcgctttttgcttcatggagttgggaatatctttgtgtgttctgtttgtaaaaaagaatttgcttttttgtgcaatttgcagcagcaccagcgagatctccacccagataaggtgtgcacacatcacgagtttgaaagcgggactctgaggccccagaactttacagatcccagcaaggcccatgtagagcatatgcagagcttgccagaagatcctttagaaacttctaaagaagaagaggagttaaatgattcctctgaagagctttacacgactataaaaataatggcttctggaataaagacaaaagatccagatgttcgattgggcctcaatcagcattacccaagctttaaaccacctccatttcagtaccatcaccgtaaccccatggggattggtgtgacagccacaaatttcactacacacaatattccacagactttcactaccgccattcgctgcacaaagtgtggaaaaggtgtcgacaatatgccggagttgcacaaacatatcctggcttgtgcttctgcaagtgacaagaagaggtacacgcctaagaaaaacccagtaccattaaaacaaactgtgcaacccaaaaatggcgtggtggttttagataactctgggaaaaatgccttccgacgaatgggacagcccaaaaggcttaactttagtgttgagctcagcaaaatgtcgtcgaataagctcaaattaaatgcattgaagaaaaaaaatcagctagtacagaaagcaattcttcagaaaaacaaatctgcaaagcagaaggccgacttgaaaaatgcttgtgagtcatcctctcacatctgcccttactgtaatcgagagttcacttacattggaagcctgaataaacacgccgccttcagctgtcccaaaaaacccctttctcctcccaaaaaaaaagtttctcattcatctaagaaaggtggacactcatcacctgcaagtagtgacaaaaacagtaacagcaaccaccgcagacggacagcggatgcggagattaaaatgcaaagcatgcagactccgttgggcaagaccagagcccgcagctcaggccccacccaagtcccacttccctcctcatccttcaggtccaagcagaacgtcaagtttgcagcttcggtgaaatccaaaaaaccaagctcctcctctttaaggaactccagcccgataagaatggccaaaataactcatgttgaggggaaaaaacctaaagctgtggccaagaatcattctgctcagctttccagcaaaacatcacggagcctgcacgtgagggtacagaaaagcaaagctgttttacaaagcaaatccaccttggcgagtaagaaaagaacagaccggttcaatataaaatctagagagcggagtggggggccagtcacccggagccttcagctggcagctgctgctgacttgagtgagaacaagagagaggacggcagcgccaagcaggagctgaaggacttcaggtaagctcaggagctggtgggagggaaagaccgggaaggcgacagtatccttgcctacgggtgttttttggtttcttgttgcttttttttttttttttccccacttaaaggaaatagctgttgtataagttaaaggcatgaagggtcattgctttggctgcttttagagatgaataaatagttctaatttcagacttaggactcacaaagcagtgccacttctttaatgtggccagatgtaaattgaatttaaaactatagaaaagctctcaaaagtactctaagaaaagatgcaatcctctcaaacttcctttatgtcttgggtaatagctcagtgtcatgtgtcttattttccgatcatagaacatttcttaggttaagacgggtcactaagttcattagtaaaccatgttacaatcttgtttaatatttctgtgacttcagcatagatctagtacctgacactttctttcagaattgccaatgcttaaattttaataattgattgcatcggtcaaaacaaaacatagtcctttaaaaaggtcttatgcactgtcccccacctcctgaactcagccgtaggacggtaaacaagtcaggatctggatgggaagcagagcaggagagacatgcttggaactccaggcaggacccttgcagctctttcaggcctgtgtgatacccagggcatgtcagcctcatttgtcagtgcctttgtttccccagtaatgatagaaggatttgtcttagatttgaagtgactttactgctttattccctgtgcttcctatattaagaactgttctcagtgacagatgaagagagggcagcggttaaatttgttacattggattctcaaacttcctgagtcctttgtccgaagtggatgtgtattggaattcctgctgtttctgaatagttcagtctcatgtgaaaattactcatcagatagcatttctgcaaaatacttttaagtcttgtcttttcacaggatgccacctgactctaggctttcatgctatagcttttggtgtctgaaaattctttggtgttttaagcaagcagaattagggatcctaagtgtggacgcgactgccattttgtagaggtcacgaggacacagaggtgccattagccctgcatgattgatgaggtagaatttttaatgctggtgtgccttaaatcacagctaaagatagagaagaatcattagctaaggctgatttgaatgatttactgtaggattaatggatcagatttttaaaaagttacttcataaatgtgttaaatatttagttgccataggtctgaccaacgctcggtctctggccgcggcacatacataggtagcatcttggaggttagctctgctgaaaataagcacctgtgttatcagctgtcaaagctgcttgcctttagtaattgaattgtgcacctgtttgtgctcagtctgtgttctggtggtgccacaccaacaggacatgatcaaattgagtccttttcaagttgcttgtgtcttcaacaagcagagtgtgccttcattttcacagattgtactataaaacacctcccaggcggttgatgctttagaatgtactgtctatcccttttgtcttcagtattatctaaaagaaatgcttgttttgtacttggccctacttacacagttcaaggttaaagttgatttggaaaaattaagttctgcaaagaaaagctgtcagagtgaccataaatttatgaggcctattcaaatagcctctacccagtgtcttttgagtaacctttaaggctacaaaggactaaagggccttaaaaatcatgtctcttctttgccccagttcattttcattattttgctttgtttgatagttaacagagggttaccttgctggagtgaaattttgcctaaaaggaagcacagaagaatcagataagaaaacactggtattgtcctaaccgtagatggtaatgacaggcattggtggcagctcttcctcctctgtgtgaggtgctggaactgtgctgcggacacatctgtaggtcaggaatgtgatccaggggtccacttaccaagtcaccataaacctgtgatgtgttcttgggaattagaaaacagatgttcatcaagatagattttgactatctggacacaaaagtgggcatttctttaaagtgtttgttttggtcttagtactttgtagtgagtttagcacaaaactgggattcctaaacttagacctgggtaatatgatgattgtcattaacgtgttgcccagggctcgtagagaggaggcctcagcctcagtgcatatttgttgcattacactaataaggagttgtttgaactacagtcgtctttctgtttaagtatagttctacttgtaaatttcgtgtagggatgattcctgacacaaggaatcatcacatctattacatgtcgaggaatactcactttcactctgtttgcagcttgctttacttaccctgttgggtacacagggatttcttacagaacaggcagcacatccttgtcctgtgttatttctttacaacaagctgtgattaagagctagttttccatactcagatattttacatgtgaatgccactttcggattccacagtttttcaagtacatgcttgcaatcagccatatgatttttccatgagttttctacttaacactgagggtcatttcctggaacacaagccatggtgccagacaaggtgtcaaaaagccatgtgctccaaatatttttcttaggagaaaacacaggaaagcaggcatgccacagtcattcaggttctcctgctgcagctcttactacagtgacccaccccccacccctcgccatggctttctggagtgctgagtttaaatctgttgctaagggttcatttccatgggctccagtaaagcagaaagggaaggaaagaggtgtattctctactcacctcctactcatctttcacctttgtaaaccccacggtgtttttgggttctttttttttttttttttttaatgagacagagtctcgctccgttgcccaggctggagtgcagtggcacgatcttggctcactgcaagctctgcctcccgggttcacgccattctcctgtctcagcctcccgagtagctgggactacaggtgcccgccaccatgcccggctaattttttgtatttttagtagagatggggtttcaccgtgttagccaggatggtctcgatctcctgaccttatgatccgcccgtctcggcctcctgcagtgctgggattacaggtgtgagccaccgtgcctggtgtttttgggttctttaatgcttcttttagagccacatttttcttttcaaaccgagttcccatcgcagtcaagaaaaaggtagagaagcaaaatgaaattctagaccaagtttttccatttaccaggaattgatttaaaaaaaaaagtgctaatttctcatgcctccatctctgctacatcccttggaaataaatgcgtgtagttccttgcagggtgtgtcttctgggtaggacgctcgttcctaaatgccttcagtcatgtatgtgttgtcgtcttaataacatttgtcttacggtctattcacctttttctttaacatggtcaatcatgtaaggttatgttctgttgtcatttatcttcagttttcttattttctaggaacttcctgtagaaaagcccccaaaacaaaacaaaccttaattgactaaaaagtattgcatgctcaacttaggataagcactacggcaaaggatacgaaatctaccaagcttgcaagaccagttgaagctgactcaaaaatcctaacattcagctgattgccggcaggcttagagtcaggcatctgctgcttcggtgggggcccaacgcgcatgctgggcgcccgggtgattgagatccaaagagaagggcactgtaagacaggccagatgaactggctcctcgtcatgggactggtacctcagatctgagcatggcccttgtttttggcacgtagcagagaaaggattgatttgaacttaaccttgcaaagcaagttgcctgttttagcagtagtttgttgtaggtttcagggatgacagatttggatgcactcatttaaaacgttttggtcacatatcagctcttgatgcctttcttttaaattaattatagacagagagaggcatttagctgatctcttacccctggtatttcttttttttgttgttttcgtttttttaaatcacaagtagattgccagcgtaatggagaggaaaccagattggatatggactcttttttatgcctattctggtgttgcgtttgtatatccaaatggacgttatcctctcagattcttatctggcactaatttataactattatattatcagagactatgtagcaatatatcagtgcacaggcgcatcccaggcctgtacagatgtatgtctacacgtaagtataaatgaatttgcataccaggttttacacttgcatctctaatagagattaaaaacaacaaattggcctcttcctaagtatattaatatcatttatccttacattttatgcctccccctaaattaatgactgagttggtggaaagcggctaggttttattcatactgttttttgttctcaacttcaaaagtaatctacctctgaaaaatttgtagtttaatatttgtttggtgaatttgtgccactttaatccttccactatcattcccattttgttacatttctgttatggggactttatgttgaaatattgtataaagcatttgtagcaatttaaaaataaaatatttaaaattatttaaattgttttggacgcttcaattgtattatatgtgatttacatttcactttttttgttggcgttgttaacccggagagtgctcctgtattgaactttgctgttagttattttattgcttctttttggagagtgctataaaagactattctaatgaaaacattaaaatttacaatttgacatacaaaaaggggttgtccattgattttaaccaatgtagcactgagagagagagaggttaattatagatagacaagagtggtgtttgttgtttttcccctcccagcattgaaatcattggggcttgtcagatgtattaaaaaaagatttgttgtgctattgctgcaaacacttaataactagaggagaatttaaacaatgcattttatattattgtaaccaataaaaaactttctaaacatctgtgaaaggactgcattttgtacataattgggagcagttagggggtaaaacaaggtgtgtgtggaggattgttcagagcccgcactctaatttaaaagtgcggcgtctactcagcccacctggcgtctgttcacttgtttctatttgacagtaactgaatatgtgctcattccagttggatttctatgtagagggtggacgtgtagtcagacaacggtgccgagaagtaccttgtgaactcactcgggtaagagtaaaatacaaaataatttcatctgtggggtctctgtgcttcctaaaagtttactgtagtttgtggattgatgtttatttctatgggcttccaaagaatgaaaccaaaaagttgtgacatactcagtttatgtgaaattgctggggttttttaagattaaaaatggctgactataagcggtttcctatagttcatcatcatagcactttgctaaccacatctgtctgtcactcctcagggaaaggtggtgaagggatagccagcttcccttggccagatgttctggcatacgatattcctcccttagaaaaacacggaggagagaggttggtgggaatctggaactggtcttcgatattagtagttttaaacaaatgaggcttcaacacacagcagtgccctgtgaggagttgagtgttgtgagaaagagcacggtcttggatgagaactggatttccatcctaacccatctgctggccgttcatcccttccctgtgccttcagtaaacgggcctccaacaagcgccctccatggctgcgtcttctgtgttttagccttgggcaagttcctttacattctggatcatagttcccagtctgcaaaaagtggggagtagactggctggtttctgagtgcgccctctaggaggagatcttttctcctggatcaagatgctgtcagacacaagcactggactgaaagagtgggatgatggctcggtctccacagtgtccctggctctgcctggaacatgacagggactcagatgtttactggaggagtcaccaaggaaccacatcacatccatctcaccaagggagaagctgccctgtttgggttgctttggctcttctttgatagagttaaacgtttttaaaaaatcaaaagctaattagagccttccatccctgttaccattgaaacatttcacagtgtttctggtaaatgccttgctaggctggctgtcttgtcctcgttgttacaagtactttctagcaagataattttacaaaaccagcttaatgtattgagtacttaatgtatgcctggctgtgttgtaggtgcttaggatacatctctgaacaaaatggacaaaaatcctgacttccgtggggcttgtattttcatagtggcttttttccccactttatacttcatattccaaacctcctcgctgtcacagttccccagaggctaggtggacaaggagatgcttctagcttaatatctgaatgccagtaatctagatgactgccggcttttaatacttagcttaaaatgactctactaaaattatagctcacttaatgcatttgatattttattcatgtgggttttgatttgatattgaacctcgctttgaatatattgacttgaatccataaaaaaaatcataaagggcaatttaccttgaaagtggattagagcacaggcggatgagaaaagggttgactaggatataaaggccacatttaaagtgtttcaaagaccaggctgatagttacagaaaatggtttatcgttccccgtcagcctttacaggcccagctctcatggcctctttcctgcctgatggcaccactcctgcagctgccgcttcaggcagcctcagtgaaggttctggtgaagcactgctgttgagcgtatgttcgagggccttgcaggtgtggatgggccattctgctagacttaacaaaacggggagccacaagccctgcccttcaacaccgtgggttccacacttcacctggggagcttgtcaaaaccactagttccaaggccctacaatgagtccatttagggctgggacctgcctgggtaatatgtactttaaagaccccaggtaaattcagggcacaggagaatttctgaatttaatatgggaagaataacagatgagtgtagctctcaattgctagaggattgtgtgtgctttaggcctcgcagtgctgcatggcatccttataattatcctgcaaagtgggcactattgttttcccgttctttctaaggctggcggggccgtgcatctggcgttggggcatcagggttattctgaagccaatcctgagccgtgtccacttggtggaaagaggaggtggtgggccttgagggtgaaggaaccacgggcctaatgtgtagtttctctctggcttatgttgattccaaggcccaagcccccttgggccttgcccttctggtggcttgacctttcctgaagggtttgcctcacaagcagaaccttgaatacacagtattatgggataagaaaaataaaggtccagattggtgggaatgatgacgtgaccgttaagattttagacagaacatctaatgtcaaaatagaagttgaatacggtttgaggtttgagtgggtggcatgtagggaaaaaagtgcgaaactgctccttggtgccatggatctctgtgctgcagtcccaggcccctaggcccgatccttgctgccacctacacagggtcatgtcacttcctccctcccccccttctgcccttgtgccgcttcctctgagtggtggtggaaatgatctgagaagctttagggtggattcagtctggctttccaatgcctgctgtttgctgggtactctgctgagcatctacaagtcttggcaatgacagcctgaggttggtgtcatttaccgatggagaaacagatttggggaaagtgattttgttccaagggcacacaactctaaggtggcaagttgggatttgaactccaagctacactgtgcagtccatcgtttttataggtagggttttttttttttaagggattttatttcttctaaatatagaaaacaggacgcagtaccttctccataaaagcttttccaagcattagtgaacaagtggaacagtcatttgtgggtaaggaaatcttcctggtgcagcgagcctttattagtcaggagttgctcctggacccatttgcttttagtttccctctcactgtggaataaacttctacccccatcacagaccaattagttcaggtcaatcaagctggcttttatagagccatgtggttcatcaacggcaacgtgactgtttaacagaagccaagctcattatagtaataccctttgattttggagatgattctaaaggccctgggatcctcaagcatctcctcagataccggcggagaaccttgagctgctgggcattaacccaaaaagaaagttggtctaggctgcctcccgacttcagcaaatagtgtgtttgttacatgcaaaacaaacaggtatttacgttctgccgataccttatttttaaagtataggattagaacctggagggggtgtgtaggtttcatttagttttctagattaagaattgaggaaaccatcatcactctacattaaattacttgcagttgcaaaaattgcatttaattgtgagtcattaaaaggtacccagaaatacttttattaaaataaacttgtcgacctgttgcgggtaataggatttgcacatgcctgcatttctgccttccttatgtcagctggatttcttttcaactcttttttaaaatagaaattcaggtggacattctggagaccataaacattttacggaagactggtgcctaaatgtgccttcccatgtccagctaataaaccatggcaggaagtcaacagaacaagccatgtttctgaacaccctttcataggtgccacctgagttactcagtgaggggagaaagaactggagtgtcatttcagcaaccacagaaagctacaggtgaattttaaagcccaggtttgtgttctgattcagaacatatttaagctaagaatatttccttattcatgtttaaacaggagcctatgatacaatctggaatcctacatctactgagtcttagcattaaatctaaatgtacatttaaaataggactcactttaaaaaacctggaatttgtggcacaggtaagttaacaaaagggcatttaggccttaggagacagttatgggtattttaattttttaacttaaaaacaatttcagtgtacagcagttgaatttgtcgtagcatttaatcattggcccaaaatatactttaattttttttattggaatgaagttatttaaaactcatggattcaattttccttgcggtaacattctcttctcacttgctttttataatcgcatccaatccttgccaacccagctagagtttagaacattttcagatggcttctatttccaggctattattggacttgtgaattcaggcacattctcctgttgtgattcagtcagccagccattcagaaaacatctttcaacagccaatctgaatcatcaaagtgtcaggctgtagatctgaaggactttgtcctgggactcttagaggaccctcggggtgtagctaaccaccatggagggagttgaggatgcgcctggagtgtcactggcctttccagcgcgtggggcacctttctgagtgctttacattttgagctctcccacatctgacggagatggtattctcatttacagatagattaaccgagtcggagagaggcaacatcacttgaattatgtcccatggctacaagtggagaccccaaacccagccatctggttccagagccaagctcaactacaatttgaaaccacctaatcactgtgcccttgggttttagagagacttgcatgtacataactgttgtgtcccccaaatgagatgctgatggccagagagcagttttactgcagagagtgtgtgtaggatcatgggaagaacatgggcattgaatgccttcccatctaggtgttccttacctgggtgctgttagttactgagtggcagggcatgctgcccacagagtgaccagcttcctggcctgtaggggagctctgtgccccccacctgccacatgccgtgcgcgttacagaaggcagcatgtgttcccagtgaggatccaatggctgatggctgtggtggcgctggtgatgacagtggacgcttaatccgcgtcaggtgctcaagtcctcacaaaaacagacctagggaggcaccgctaaggaaattgccaggtcttagtagccggccccgggtggaaaggggcagcatgtggggaacttggatgatggtgatcactaaagaacttggggacgaggctgttgcagaaacgactcacttttcaaaagccctgaaagagaaaaaagccctttgtgggaactgagaaacataagtttctattaatttcatgagtgggtggttctatcctttggtgaggctagagctttgtcagaatttttaaaacactcctaaaggcttctagaatgatgtattcttttctatctaggtaagtgcggagcaattgagtcccggctcatggagagcatagagcagggatgtccaatcttttggcttccctggcccacgttggaagaactgtcttaggtcacacataaaatatagtaacatgaaagctgatgagctaaaacaaaagaaagatatcgcaaaaaaaaaagttagtgttttaagaaagtctatgaatttgtgttgggctgcatgcagcttgtgggctgcaggtcggacaagcttggtacctggggagctccagacattgattctcctgggatccctggagcctttctcagtctgagaccagggcccctcatgggagcaatgcaagttgagacagagcttcagttcagcctggtctgccatgattacatagaaatggaaattccaagttcagaatttcctgaaggccacttgcattccacagaagagatggtgaggtgcaggccagcactagccggggttgaggttctactgttttcatgacaggcagcggaatgtaggtacgggcattggctctggacctggaaggctgatcagctggcacctcctccaagaagcctttcctgaccatcgatctgtcacactgcctggtccctcatccctctacttgctgtgctttactgttcaagacccttaagccttctgtacattctgttatggactcattatgtttgtttactctatgtctcccccttcttagatgagagttctacccaggcaggaactttgatttcttcactgctgcgttcccagcatctattaatagaatggagcctggcatgtagtagctgctcaataaatatttgttgaataaaatatttgaattctggctttatcatgtgtagttctgtaagcgtaatctatgcaagttactcaacctctccgagcccgttttcctttctgtggaagggcagtaatcaatctgaccacaaagaattgccacgaagacaactttagagcagcctggaaggaccacagatgctgttcaccccagtgagtgctgtcaacgtcagctgctgtcagcatcactattatgactgactgatgtcctctctaatctcagtttgaatctgatgaaaagttgagcctggcatgccatgtataagatttcatgacagcgtgagttgtagtagccagaacattccctcattatctcctgcctctgcccagagagaaagctctcaagtggcctgtaactcctggtttggctaccagtggcaccaaggacctttgctgtgtctttgccaggccagagctgttcctctgtggaccagagctgcttccttcttatagcagatgctcccacccatcagaactaaagagaagtgagctgtaagacaagaaatcattttccaattcaaagtgagaaaaaagatgattcattcttattctatcaccccctccctgtaactttctatttcttttggttttgaatttcaatgtcaatttttaaaaggtaagttaagaagaaagcatttcattagctctgtcaaaccatgaaaaccaaataacctcgctttgctgaaacaataataatgtaaggatgatcaccgataatgcttgctggccacgatgtaaataaagggctttccatgtattacctcatttaatcttcaaaagagccctatgaataatttcatgttctcccattttacaaatggggaaaccgaggcacagggaagtcaagcaatttgcctgaagtcacagatggtaggaggtggagccaggagtcaagtccaggcagtctgtctcatctcttaatcatgagtttgtgctacctctcgtctgtggatctaggcgtgaggaggtagaagggagcccctggtcacgcccctgtgccgccttctagtggcatggcctttaagcagcaaagaatgtgacttgtaagcaccttgtctgctggacaagaagcaccagcagatttgaaggagctgaaaactgtgttgcgggtgaatggatgtctttgttcttcctgggatgaacccattttgtatcttcttgggaaaccagcatgtctgaggtttcggccaggcctcgtttttaccaaggttggagcctcatccctccagctttgttagagaaggagcagatctagatactgaacagcccagaggatggatgaacctactctctagggtcaacttctcccccttctattttcacagaagtctttccaagccagggttgaccagcaggtttccatttgtgtagggggagcagttgcccagggtgctgcatagaactggattctgaagctgggttcacactcagggaaagagggctggctaagtgacccatgtctgccttgtatgcaggaaggcgagtggttctggagtgccaggtatttgctgcctgtgatgtcattgtgtctgctacttttctgctttttaaaactacactggactcaatttcacccttctttgagggttcaaggtaaccatcaattaatactttgttgtagaaaagatgattctggcatataggagatcctgaccccacactagaggatccagaagcttgagatgtgacttttgagaagagcgtactcctcaagatctccttttccatctgtcactcatggatattgtctgtacttcctggcatccttcagatatgcttctgttaattgtgggctgggaagctagattgtggtcctgttaatatcatatgtaaacaaagagatggttggccctgagagatctcccaaggacctcccttgtaagcaaagtgcattaattccagaacatggatttgtggacatggtttgctcactcattaacagtaggtcttgaccagatgcggtggctcacacctgtaatcccagcactttgggaggctgaggcgggaggatcatttgaactcaggagttcaagaccagcctgggcaacatagtgagaccccatctctacaagaaataaaaaagccaggtacagtggcacacacctgtagtcccagctactcaggaggctgaggtgggaggattgtttaagcccaggaagccaaggccgcagtgagctatgattgcaccactgtgttcctgcctggccagcagagtgagaccctgtctccaagaaagccaaaaaccaaaacacaatagactttggctcttggttctgtgctggtaagtgatgttgctgggacaagtgacctagataggagagtattaagtataacacaccgtataatggactgctttttttcttttaagctcccaaaacacgagttaaagaaatgatttgtggagggaacgaaacaaaagtttgggtaaaagtgcaatcaattcctttctcagcaaatatttgttgccaggtgaagttccttagttctgaaacaagagtttccttctctttaccatcctatgtcctttaatttatgtttagaataaataatctatttggtgccaagtggtttaatcttgatagttttagagagctggtccttacaaacccatggaagtactggtagttcactacctttagcagagattgatgacctgcccatgaaatggatttctcttatggattcaggatgttactctggaattgttttggaatttctctaatggccaatgtttatgtttacaggtgtgagttttatactcttactgtcttcattcttatgttaggctcctgtgatttaattttacgagtgagtttagtgaaaacaaatctgtgttaactttaccttcacgtaggagccaactgtttgataggcctcaatgaactggtgtcagatattgtagttgaaatatatgccgtgccagattatttcaacattgtaattaatgataggtttatatcctttgaaagcatttttaaaaattacagacacagctcgtgagtgccagctaacagcaggtgttttattaaagtgttgttccgagttgtgtgtggcacatggcgaggtaagagcattttgcggtttggtttgcgttgttaattacagctttaaatgccatttcctgtctgtgttcctgggtgtgtgatggggccctagtttggatcatctccccaggatgtttgctcagtggaccacctacattaaaaaatcacctgggtgattaaaagtttcagacctactaaaccataatctctggggtgggactttgaaatcttcatttttatcagcttgtcacatgagtcttacccagacttcagagggcttttaaagtattattactttttttaatgacatggtatcactcatctcatcacttaatttcttctgattttgattttaaattcttttcctttgcttgtttaccatctctttgatatacttacagcaacatttcaactctcagaacactttcaattatgtttttccttaattcttataacaacccggtgatagatgagtcaggggcagctcaggagctggggacatttctgagtgtcgtaggtaagagggaattgggggttcgccaacacagcgccctgcatgtgtgtgttcacctgcacccaccgtaggcctgagcatgtggtaggaactcagtatttgtggaagaaaaagaaaaagaaatcctcaaggataatagagccaaagctaccgctccgcctcagtgacctacttatgtgaccctaactcatgaccctcttggtttaaaatgtgaatgttggggcaattaactgctggtgattgaacaaagaatgtccgttcataggtaaatgatccattaaaatcaagccgaaagaaaaggctggtgatagctaattaaaattagtgttactgcctctggggatagtccttaaggttaagaatgcataatgaaagccaatcagtaacccatagagaccagtataaaactgctagcaacccactacagcacagtgtattaattcaaaggtactggtggaattatagtctcccctcccagtctacactggtacacacaccaaagattcgagtccttacaggctgtctttgactataactgaacatcatgggggtagaactattcaactattccttcagatttctaggttctttttcccctatttttggacctgaaaatagggtcaccctttctgtagtaccaagcttgaatttcatctcctgacacctgacatctcttaaggggtgggaatggggggatcgatccttccctagtagagcctcccaaaatacatagcaatggatgactttccttgcacattttctgacttttgctcaaaataatgaatcatcttcttagggtttaaacactgatgggtttcatggtgccatgtgcatttgaatgggctgtgttaacaaagctgttccaaaaaccggatctgcaacacagtatcgcttgccttggagatttctccttcaccgtggtgagtcagagctgctgggtaatgtgacttagtcagctggatcaaagggtaacaaacacaagcactccaggcaaacacagaggtctccgccacttacttcgtcactaagtccggcatgttcaccattgcctaaggaagaacagagaattaagaattgtgaggccgggcgcggtggctcacgcctgtaatcctagcactttgggaggccaaggcaggtggatcacctgaggtcaggagttcgagaccagcctggccaacatggtgaaactccttctctactaaaaataccaaaaattagctgggcatagtgacgggcgtctgtaatcccagctactcaggagactgagacaggagaatcgcttgaacccgggaggcggaggctgccatgagctgagatcgcgccattgcactccagcctgggcaacaagagcgaaactccatctcaaaaaaaaaaaaaaagtgagaacattttgcaaagcacaaggccttggaaagtggaataggaccagaaatccttctgaacttttttgctggaacgccaactgtggataaaacatacagttgaaacccagctgactttagtttgagcgacccaccaatattaatgcatgttcttcattgcctctggaaatcctgaccactgctcatagggagagtccgtgtgcttccattcccagcagccaagttaaatgcatgccaaaggtcagttgcatttgttcccaaacctgtttatgccgcttgtatttattatcacacttgcacaatctaattaaatattatacaagccaatgactagcatagagctatttatgaaaaacaagttgaatacttagaaaggcacatagtaattcgcttaaaaattgcagtccaacaaggtgtgggtgagaaaattaaaaatgtgccgggaccagggcagagatggtaaaggcataggaggattttgtactcagattccccttataagtgtcttagtttctctctgcacttttaacaaaaactggaagttaacagatgatgtaatgtgggtgtgatttagtccagaaaggcagtgcagatcttggccattcattcattcattcattcattcataaatgcggggcctacgcctgctgttacatgcctggcactgttttaggtgccaggggatatagcagggaacaaaactgtcacaatgtcctactccacggaatttatgttctagttggtggagacaggaaagtaagtaaatagatggcatgtcagatgataaatgctagggagagaaataaaacacagatgcgggaatagagacttctggagtggaaatggggagtgccttgattacatgaaagaagatggggcctggcacccatgggaggagtggggctcaggagggggcatcccgccttacaaagaagaagacagctgggaagggaggcagggcgcaaactgtggaagtcttgttccaccatcattgtgtgccatagggagcgaaatcattggaggtgggtgaggatggggagatgtggaggaagaggggagacggtgagcagcagccatgtgggtaatcaagggaacggcaccagggaacagagaagggctgccaggaggcatatgcgctgggagcccaccggagttttggggtcatgaatttaaaatgcggtcaggcagcatgtttgtgtgtttttctccatcaaaaaggttgatgaacacacacacatccctctatttctaattaagaaatgcttaaatgtacccatactgactccctgctttgagtgaccagctgctgggccggctctcactgaaggagggttggggggggtctcctctcataagagcctctctggattgaactccattgagctcctgctctgttccaggcaccatgcaggcagagttgggaatgcttccccagctatacgaagttggcgttaggcccgtttcataaaggaaactgtactgagggggcaggtgacccgctcaggctgctggtggtggagttaggactgtcagactctaaacctcatgctctctgcctctccaggagcaccaggtcaaaccagatgggtcaaaagcctccacgtacctagtgttccagtagtgccccctggggctggagaggaggccgtggtggggagggcactgcaggcaggggcatcgacgtgagcgaggactgaagtgacatcctatggagggggcaaggggagggttcaggccagggcccttctgtgcaggaggccactctcctggaactaagtagggataggctttgacaaagccatcccttgcagaattccccttgtgcgttcacagcgtatgtttgcttggctcagcactgtaacccacagtaactggcagagtgagcggtcagtggctatcagataactaagggaaatatgtttggggtagatgacaacctgtctcctcttcttaggaatttacactgcctgtcagcacatgaaaggctcagaaattgtgcagagacacgcccgtttggtttcacaagcctgtgcactggaggtaaatggctcgggcttccatcccagttctgccgcctgccagctgtgtgttcttgggcaagttgcctaacttctctgtgccttagttcctcatctgtaaaatgcactagtgcccgtctcctaaagttcttgggaagattaaattcattattccataacaaacacttagcacagtgcttggaacacagtaagcaggaaatgttagctgcaattatgcaaatgattatgaggacaaatacagcgtctgcgggaaccagttccactgaacctggtttcgggaaatgctggtaacatggaagaaacactgggagagttttcattccacatgcgccacctggccgtcattctgtggtctccccaaatagtgcctggctgggctgggtgtctgtttgagcagttctcaaactaaatggagtgcaggatcctgggaaggtctgagcagcccagggtggggccagacagccaggatcagagtcatctgacacctgcaggcctccgtaggctcctcgtgtgtaaggtagattgagctgtcccgtcctggccaccttacagcctgtttgaggactttggggatcacgagcagaaaggtagaaggcacaagagcagactttactattcaaccccggaccctgggcacattctgaggatgagacctccagctccacaggccatggtgcccttggcctttgggcagcgtcatccccgtgttgaacaacacccgttcaggcaccaagtgagcgtgcctttcccatgacagtgccagccctgcatctgggacgccctgtcagccaggcacacccaggcctcccaagacaagctggttttgacctcttgggtagcaaagaaccccaagctcccacaggcttcttgagcatcgaggcaggagcagagggcgccacagggagcagctgcctctcattgttagcatccctggaccggttccgggtcgtccagtgtgggcatcaggcatcatgttctagaaattctgggtccagggcagatgccacatgaggcttctgagactctcagtcccagcaactccaaaccacacacggggtgagctcttcttttcttggtccttggggtttatgtaatccctttgacttctttgacctagatcatctttaaaagatggaacagtggcaataatgaagctttagtgtccttacagaatcttaccatctaaaaagggctcttctgctggatctcataagggaccatcatctcttgcttcccaagttgggaatctgctttttatatgttcatcagtcttcacacactttgtgttcgtgttttctttttggcttccctcctactcttagaagttgccttttgaagaaagcaatatgtttcagctccacaggagaggaaagaagggacaggatttggggcagcctagaaccaggtggctgcaggggagcgtgtgatgggaggtgtgaaggcagaggagggaggaagctgtgaagctggaggaaccgctcctccaccctgctgggcttctctcacccgggctggtcgtgtcacgggcagtgacggtgtttccagccgaggtgacattctccagacttgaacccctgtgctgaatggagtggggaaggtgggctggggaggcctgagggctgtagggttaggttcacagaactgtcgtaaaaatggggaccttgtcccctggtttgggcgggaccttggcaatgagagaaaccgtataggaagccacgctgggaggatttggttcttgagcagcatggacaggcacatttcagggttgaaccgcaccaggagcctggctttgccatccatttgttcaggaaacgttctctgagcaccagcctttgctaggccccgtggcaggttcgatgggtgagaagtgaatagactccaaccgtgctctcctggtgctcccagtccagtgggggagccaggtgggtagagccagttacagagatctgagtgccctcagcgagtcctcgggggcttcaactacccttcttcccatcatcaatgtccccaaataagcagtgagcctagtcctgtctcctcactgctcccaagaacaacctggagtatgactgtgagcgagtgccttgctcgctctcctcggtttcctcgtctgtaagggaagggctgatccctgtggcctctggggtcccctgcacttctcgggtcttggcagcaaaagaggcagccacagccgggggctttccccgcgggcaggttctccgggccgaggtcactgcaggccaggccgggccagcctccctatcaactgggtcatgtgttacgagcttctcacatgctgggtatttagagttcaacccaaacaggtttggggaattcatggcctctgaggacctcagaacctggcttagaagctccacaaagcaggggcgtgattgatcttttgggagcgtggaggccacattgggggctcagcagtgggcccatggcctccctcagggctgatgagatggaagaaaaatgtgtctgctgaggccgacttcagccctgaaatcagatctgggtgtgaatcttccctccctttgtccttctattcacacctcttaagtacacgagttacttaacctctctgtgttgctgtcccctctgccataaaaagggtataacagcccatctgctgggactaaagggaggatgacatgaagacagcgcatgggccagtgtgtactaattcctcatggtcaactgtgttgtccccactgtccccaccggctgtactcaagggctctgtctcacctgaaggcaccgcagcgactccttgggctggtggtgtcaaacctttacccctgccccccaaggcctacgttcattctctccccttcggccccctcatttggagactgtctacagaacttcatcaagcagcagctcctctccaggcttcagaacgggcccctgctggccactgcagcctagcatgctgcccacacttgagacgccgctaaaggtgtcccccagccccatgctcttgcggcgtctgcatgcagatgcctctcccagggatcttcttaaactgcaaattctgacttggagtgggtgggagctgagagtctgcattaccaacaagctccggggggggaaatgatgccgctggtctggggaccacattttgagtacaaggatctagaccagtggcctgcaaagacaccttttaaaattcccaatgcctgggctgtacctgaaaccaacgaaatcagaacttgttgggatagaaagcaggcatcaggatcggtttagtatccccaggggattgcagtgaacacccgagtttgagattctctgttccagtgccctctgagcaaaggtgggtccagcccaaaacagactgccagagtcttgagtggtcaatgcagctgctctatgggcaaaggctcacccccacctggctttgggatattggaaacaactcttcaatcctcactactatggggactgtgtcagggagtggggcatgggctttggtgtcaaatggtcctggattcaaatcttggctgcttctctacttggccgagggaacttgagtgtccagcttctttatttctctgagcctcagaaccctcctctgtaaaaccaggaccatcacaggcccagccttacaggactgctgggaatttgaggagctcccaaaaactacccaaagtagctcctggtgtatagaaagtgctcagtggatgatgcgatgatgtttttttcccccttgcctgacatcctcattttacaggcaagacttctatggctcagcgaggtagaggcattttccagcggctacacagcaagtccgtaatggagctaggattccagctctgggctctggaatccccaccccatcctcctttgggttcctgccctgcttctttcttctctgtcttctcagcccttcccccaggctgggggcttcatttgaatgggcaggggcttcctgaagcacgtgggccttcccacttggggaaggtgggtcctgcagtggatgtcgactgttcctggaggtggctgagggccgatggctcccacagctcccacctgtgggccctcacccagcccccagggaatatcagcatcatcacaggcttgtcttacctttgcaccatctccccaccctctgcctttcccctaccttcagcaaaagtgcagaatatcagacactgacttcaaatgaattgcactctgagaatttagagagttgtgtaagacttctgcggccagcgatgtggcctaaccagctttctgtatggctgtcccaggagatccctcctgaagactgtgagaaaaaggtgcaaggagggaccagggcaggcagagatcccagcccaggatgcccatggcggtctggcagggagcttggaagagcaccgtggccacgtggggaccctggagccctggagagcccatgtcctctgaaagccggcagctccttccctcccaaactcctttccctccacccttcttgaagcgtcctctgggttcctgcctccagtgtctcttctccccttctctcttgaactcactttcagggttttggctcttcttgaggagccatcaaaccaaggttatcagcagcccccaggatgctcaatgcagtggttggtttccagtcccatctcccttggcccatctgcggcagtggacgctgttaatccttctcttccttgaaatactctccacctggacaccgccctctcccagtctctgcacattaccagctgctcccccgcatcccgcctccatccctgggctctgtcccccgcatcccgcctccatccctgggctctgtcccctcgctccgtctccgctcccccttggtgatctcatccagtcacatgcgttaaataccacctggatgctgaccaatcccgggtttccaccctcatcagaatctccattcagccgcccacctgacatctcccttgggtgtctagattcaaatttaatctttccaaaatgaaactgtctctccatgaagcctccctctcctgctgtcctccctatgtgggatgaatggaaacggtcctgcttggagtccagctaccagctagactccaacctcttcctccatccccacatccagctcatcagcagatccccaaactcacccggaatccacagcttctctcagctcagcctcctcagctgacctgaggtccaggccaccatcatctccctggatggtggcagtcacctccttgctggtgtccccagttccttccctgtcaacccacggtctgtgcccagcacagcagccactttgggtcatgatattcctctgcccagaaggacaactgactgacacctcacttgaaggcctatgagaccctcccctctgcccacatcacctcagacattcctggtgggtctcacctcagggcctttgcacttcctgtccccacttcctggaacgcacaaggcgtagtatccggaccgattgatccccccaccccaggtcgtagcccacacactgccgtttcccatgtcacctttccctgtcttctcctccactctgaccttcactcctgtttcttcagtttcattttctcttgtatatttcagtgtgtctggatttctcccttatccaaaaccactgggggctgaataagaatgtggtcatttgggagccaggaggcctgagtcttggcctcgtacgggcatcaaactccttctgaaatgagtatctttcctctctaggctacactaagtgacatgtaaaactatgctatatgtagagaacttgacttgttttattcactaaaactcctgttggcaaagcacctggcacagaatagacacaccgttcacctgacaaatagtagatgactgctactgtatgccagccagcggctggggtgctggaggtgcctccgtgacaaaccagcctccaatgcgccccctcatggagcctgctagacagacagtaaacaataaccagtaaacgcagctctgttgatggggataagcacaactcagaaagtaaaagggagtcgagatggggagtatcagggggatttgtgatttcaaataaagtggttaagcgaggctcactgggaatgagacatttgaacagaaacttgaaagggggcctgggagtgagccacaagaccacctgggggaagagtgttccaggaacagcctgtgccgagtccctgaggcaagaatgggccactggaaatctgaatgactgaatgaaagaatgaatgcatccttgaggccaggaacagagcagatgttctatttctagacatgttctattagacgttctattgtatagataatgcccttgcattgtcttcagactagcaaggaattctgacaagtaagaaattaggatccccaggagacgatgctctgaggcaccatttctgagccttcctatgagccgggagtggaccaggtgtttgaggtctgccctctgcccaatccttccccgtccatacagattggatggtgtatgacatccccctgtgctttcaaagtccattagtttttgttctaagtaaaatgtccagaaatttccctcctagagtaggcagtagagcacactttgccagaggccagacacttctgggcaaagcctgtgtggggcacacagcaggttcctcccaaccctgctactatgtttaaaatgttcaaccactgtgtatgaaaatcttaccaaggtaatgctacactcccctgctttctaaaaacagttgatgctgggccgggcgcggtggctcacgcctgtaatccccacactttgggaggccgaggcgggcggatcacgaggtcaggagatcgagaccatcctggctaacatggtgaaaccccatctctactaaaaatacaaaaaattagccgggcgtggtggcgggctgaggcaggagaatggcgtgaacacgggaggtggagcttgcagtgagtggagatcgcaccactgcactccagcctgggcgacagagtgagactctgtctcaaaaaaaaaaaaaaaaaaaacagttgatgctgaacttgttcaaccctttcttgatgtctaggattgaggactacgtatctcattcattttgccgggattttatggaggagcatcttggggagcatagtaagtccattttccctcccctgcactgaacagatttcttggtgtctgagaacagctgtgcagtgggaatatcacagagtcttgaattgctcatttcttccttccttacatgttgagggtctattattcactcacgcacagttaggtactaagaatacaatgatgaacaaaactcaaccacgctctgccatcagagaccttacggccccctggggagacctgcctttatcagacagtcgcagatgcatgagaaactgcccgtgtgggggccggtgtgggaacctgaccagggccatgttgcctcaagagggcgaccacagaagcatctccagagcagtggttctcaacccagctgcatgttggaatcactgaagagcttaaaaataccattgcccaatcctgccccagagatcctgatgtcatgtcctggcatgcagcccaggcctctctgggtgaatctagtgaggagccgaggctacaggccactgggaaatggggtctacccagattagctggagtaaacaagaacagaaggggagagatgggctgggagggcagtgcaggctggacttgatgtatcaaggaacttggactgcgtcctgggagccatggggttttgacaggttgcagcaggggcgtgtcgtggtccgttttgccttttgggaagaccgtcacacttctgtggaacagatgggaggggagccagtgtggaagtgagaagtccagtgaggaaggcgccttgcaggactccaggcgagaggtggtccccgacagtggtagaagaggaaggaaggcggactcgatggagccagtggcaggtgacgtgtagcaggagagagtgacggagggaccgtgttgagtctcaggtctctggctttcagggcacaaatgcagtgctgttcaccaagaacaggagcagggtggagtggcaggcgtgaggtggggtcataatttaagttcaggaactgatttaaggggccttctagatgtccaagagatgtcacgtcagtgcgtgaatggagttcaaaggccagatgtgggctgggcgtgggtgccggtgagtcatctgtgtgaggctggccgtggacgccaaagccacggatgcatcgcctagggagggagtcacctgcagagatgacaggctgtggtccagaccccgtgttcagatcctaatctcaccaagcatgactctgggcaagttgtcttaacaaaatttgggctgccataacagaataccatggactaggcggcttaaatgacagaaatttttttttcacagttctggagactggaagttcaagattagggtaccagcatggtttggttctggtcgaggctctcttcctggttcacagactgccaccttctgtctgtgtcctcacatgacctttttcgagcacacgcatcttcttacaaggcacaagcactaatcccgtcatgaatgtcccatcctcatgacctcattaaacccagtcacttcctgaaggtcccacctctaaatacaatcacattgggggttagggcttcagcatatgaatggggtgcaggggacacaaaggttccatctataacagttaacctctctcaagtttgtcgacctctcaggttccccaaggacgaaattaagcatgcatggaacccgggacatcatggcacatacatggcctggcacatagtatttccctacccttgaacttgccctcctttcccgcttccagggaagtgtctgctgtctgctacagactctgtatttgcctcaatctaacagctcttttcttcctcttctattcattttgctgcttctgattggctgtggacttgtaagccatcggccgtattcgtttgaattgtgtgtacagtaagaacagcgtgcactgaacgtgaaagcttgagttcttttttcttttcttttttttttgttttgagatggagtctcactctgtcacccaggctggagtgcagtggcacgatctcggctcactgaaagctctgcctctggggttcacaccattctcctgcctcagcctcccaagtagctgggactacaggcgcccgccaccacacccggctaattttttgtatttttagtagagacggggtttcactgtgttagcaaggatggtctcgatctcttgacctcgtgatccgcccgcctcggcctcccaaagcactgggattacaggcgtgagccaccgcacctggctgaaagcttgagttctgtgtgactttgtgctccttagggacaggctgcaggcccaggcatgaattttagtgcctgcatgcagtgagcttctgtcagagtttacagatctgggccaggcgtggtggctcatgcttataatcccagcactttgggaggccgaggtgggtggatcacctgaggtgaggagttgagaccagcctggccaacatggtgaaaccccgtctctactaaaaatacaaaaattagccgggcatggtggcaggtgcctgtagtcccaggtactcaggaggctgaggcgggagaatcgcttgaacctgggaggtggagattgcagtgagccaagaaagcacgactgcactccagcctgagcgacagagtgagactctgtctcaaaagaaaaaaaaagagtttacagatcagtgggcactggttgtggatggctcagactttctacaacgttctaggctgttctctggattgtgaaggttaaggggcctctggataagtgaggcaatggctcgttaacgcttacttgcacagtgaccatgccatcaccataacccacaggaagcatcctgtgacactgtgctcgccccctgctggctgatggggcatccccttgtaactggaggcagtgctgggagcgcacaggctgtccttgtgccagagactctgggctctgccatccctggacaggggccgggcctggggagggtgtgtggtcctgagaccatgtttcctccacctgcaaaccaggggcatccctcatggctgcctccacccacccacccaatatttcctgtaccaggtcctgtgcctggggacacaggggattccactgtcagcaagactcagtccctgccctcaaagacatcctcttctagtgttgaaggagtaagcaactcgacaggcaaggtgattgctgtgggaaaagctgtgagcaaaaggcccagaaagtcacagaaagacagaaggaagacagaagggaactccaaaggctatgggaacagggctggggttgccactaaggtggggaggtcagagaaggcctctttcaggagacacttaagctgagacccacaaggtgggagggagctgtgggcagaggagggcagggcaggggaaagccaggcagggagcaaccaggtaagaagagcttggcctggctgagagacaagtgcacagggtgaacacagagtgcgtgaggggactgggagggtcgcaagcaggtgcacagcactctgtgtgggaaggcttgggccacttttgcactgggcagtgatgtggtccagtgtcgtggtcatgtccggtggtccttataaaggcctctcttgttgcttagtggagaatggattggtggtgggggggagggtgcagcgtcgaagtggggacagtgcagtggcaattgccacagtccccgtggaaggtgttgatgccacaggttgtgctgggtggtggcaatgggagtggagagaggtgtgtggacctggaggcagaattaagggacccggagatggatcagctttagggtaagcacagcggggggtctcacaggccccatgatcacagcacactgctcgatggtgtgcctgcttcaaatgtgtgtggtttctaggtctatggccaatccgaagcagcaaaatgaatagaagaggaagaaaagggctattgggctttagttgtaacaacaacacgtttggcagtgccatttcctgagaagagtgacaagagtccagtgtggctggagcctggtaggggcgggagcaaggtgggaccctagcatgtcccactttgccgtgttaaagtgagatgctcattagacatccaagtggaggggcccggcaggcagtgggtgtgcgggtctggagccctgcccaggagtttgagccaaaagtctgaccgaagtgttgacacagaagtcttacctgacattcagtctttaaggaccagtcaggaccctggctcacctcctgctccgatgcttcctggggtcacacccactaggagcatctcacatgtgctggattcttcccagaaagcaaagtgctctcaatcctggtcaccaaaatgcttccagccctgctctctgttggcaggctggcagggactgtctccattttacagagggggaaaccgaggctccgaggccgagcgacagggagtggcttaccctgggccatacagtcaatgagaatgaggattattagaggccacccccaggtctccagcggccatactgcatcctcctggggtgatgacttctccatatgagtccaccaaccgcaactgctgcagtcacgacactgtgctgatacctactggagtgccaggatgccctgcacggagacctttctccaaagttaatcattactgtaaccccaaactggtcttcccgatttgcagaagatcaacctggaactcagacaggtccatgactcactgaggtcacacagctagtgggtgggaaccaagaatcatgaggctctgcgctaactgctactgtgccctggagaagcacccaattccggagccttggtcctcggtatttaacatctcggggttgggggcactgtgctctcatgagttctttgacagtgaagcacttcttgatcaggaaggacagtcccccacgacatcctgtccccgtcctaacaggaaacacccaattagtgacctggtgtttcttcaaaatggtggcctaaggagctgaaagcccagggctctgctcgcctgggaaagtctccatatccgtctgagcctcagttttctcatccgtgaaaggggtataaaagcacttgttcttcctacctcctgggctgctgggagggttcagagagaaaactgagaaagtccttgggagtcatggaggccatgttcatgttggctgccgtggtcctccattaggccaggcagtggatgaggggtagcagaggggcctctgccttcaggggttttgcccccgacctactcgttccacccagatggacgccctgagccggggaggaggcgcgccccctggtggagacgctatggttgctgcatccgcaggagcccaggcggaagagatgctaaagggagcggagacacactggctggctagagaggcctgggaggtcggggtgttatttttgtgtgattgatctggcttttggatacttaacagcagagaaagggagaagctggatactgatgatgcagggcttgtctgtctccaaagcttctgctggtcttgctacaccactgtagacatttccctgggaagggggacatcgtagggaggggacctgctctttgccagctctgtttcttattgcccaacaggacacaggagtccatgtctccagcagcctcccagctggctgtctcctcccaggttgggtctcctggggcaccagccagctagaatggggttggcgggggtggccactagctgccttggtggcccgtcaggagcacagttgtatgaagcatgggtcctccgtttcctccttaactcttgcacaggcgagtagactgagctgaccgtgggccttggctgcacagcgcaggggaggaattcaaacaggggcagccctgaccttgacagagagccaggcccttgggggaggctcactcgtgacaacagcaggtctcttagtcttgtctaaggcttttctccagcaccttctacatttgcttgtctgttgatgcatttgcttattttaatattgattgagggctcccttgccaacattgacactgtcagcatttggggctggttaaacctttgttgcgggggcctgtcctgggcactgtaggaggtttggcagcacccctggccttaccttccagatgccggtagcagcacccttccctcaggtatgaaagccaacgatgtctccacacattaccaagtgtgtaccctgattgagaaccactcatgtgagctctaccatgtgccagctttgagctggactccattcccgcctcctgttcccgcaggcagagctggctctgcaaacacctggagcaggtagggttccgggcgtgtttgtccctcctgctttcctacctgcctggcctcccacctcctctgacctgggccgccttgtccagaggcctccctcactttccattcttccatctagagaggtagacaggtgacaggctctttgtgcctcagtttcctcatctgtaaattagggataataacagtatccacctgggtaggttttgtgaagagttagattgtttgtgtatggaaaatacctagcacagttctggacatgcagtgagcctgtatgtatcactcttactcagtggatgtttgtttgtttgtttatttatttatttgagatggagtcttgctctgttgcccaggctggtgtacaatggaacaatctcggctcactgcaacctctgcctcccgggttcaagcgattctcctgcctcagcctcctgagtagctgtgattacaggcatccaccaccacgcctggacaattttttttttgtatttttagtagagacagggtttcaccatgttcgccaggctggtcttgaactcctgacctcaggtgatccacccgcctcagcctcccaaagtgctgggattacaggcatgagccaccgcacctggccggatgtttatttttattgtgccaagctggggatgcaacaatgaacaggacaaagatcctgaccttgggatctcagagctcatgagaaaggcagacaccttattctgggcttttaattcaggtgggatggggacacctaaggggcctgttggaggaacaccccacccaggagttaaagaaggaaagcttcctggaggaggtagcatcccagctgggctatgaaagagaagtacgagttagctgagtgacgaaaggagaggactaatggtgtgagttatctatcttttaaataaattttttaaaagcccttctgaaaaaatcaaatcccatttactgggggcggtggttgggggtgcttttctgtacaaatagtacaaaaccatgcccccgaaattcctagattcacctctttgggaagccacgtcacccctgtgagatactcagcatggaagtgcttggcacaggatagatgtggagtgtggggttaagggcaatggagctgcctccattccccacaacccagcccatgtgcaggtgtgtttgtactttgataatagtaacctccccagatgcttttttccttatgggtgttggggcctggcaggaggggagagcagggaggcaggtggggaaatggaatcagagaagggcacagccgctgttctgatgcaatcggagtcattctggctcacctgcatgtccactgggggtcaccagacggcactgcccatcatggtgtctcagaaccagcccaatggacactcctcttgcccgtgcttctgcgatcgcctccgaggggagagaattggtggatgggacatggagaagtgcacattggtggttaaagctcatgtcctattagctgatgccaggcacctggcctcaaggtgtccaggaagtgcaatcctatcctggcctgggaagtggtgaccagcactaaggaagcccccccagcaatgtctagggcaccgggctgggctcctgtgacaatgtgtgttgttcctcttcctgcacagctacagcctccgcttggcgtcccgatgctctccaccagcggccccgtacatcaccaggcagtataggaaggtcaaagctccagctgcagcccagttccagggaccattcttcaaagagtagacactctggctgctccctgacaggtacgaggcaggatggaacagcttctggcactgtttgggtgggtcaagggggtgtgggcttgggtcttgggtggggagggaaggagagaaagcagtgggtgtgattgcttgtgtgtaccaggcacggtgcagggcctccctccaggagggcacttagctgagtgcagactccggaccacttgtttcacatcccagctctgccacttgctggctacgaacttcaagcaagttacttagtctttctgagcctcagtttccacatgtgtacagtgggcactacaataggacctactttatagggtgattgtgacaattacgagtgtcaaatgtgcgaagcacctagaagagtgtctgtcacatagtaagcactaggtaagtcattattggagtaataatgataaaaatagtaattatactcagttcttaattgcctcagaggcattaagcccagaaaagatgaccgagttcctattctcacaatgtttttgaaagtcaaaataatacaggtggagtaaccctaatccaaaaatccaaaatctgaaatgccccaaaatctgaacctgagtgaggacattcaaaggaaatacactcgaaggaaatgctcattggagcgtttcaggtttcagatttttggattagggatgctgacccagcaagtatgtagtgcaaatattccaaaatccaaaaaaaatccaaaatcaaaaaatttcgggtctcaagcatttcagacaagggatatgtaatctgtcctaatccataaaatataaaactcagatttattttggactaaaacagcctcttcctaggttttctgatggtaaaaacctggaattactctaagatttctgttggataaaaacatggaaaccagacttttcatttttggagtacctggattctgctggtgacccacgagcaggcttggccctccctgttggtgacaccacacaactgcattcattgtgtccccaaggccagcatctcaaagtgatcagaggacctcatacatcagaagatctaggatgcttttataaatacagacctcagagtccagttccaaatgtacaaaatggccaaaaaggctcaaatcccatttactggactatagtacgaatagggccaaaccccattaaaaaatcccgagttcagccgggcgcggtcgctcacacctgtaatcccagcactttgggaggccgaggcaggtggatcacgagatcaggagatcgagaccatcctggctaacacactgaagccctgtctctactaaaaatacaaaaaaattagccgggcatggtggtgggcgcctgtagtcgcaactactcaggaggctgagacaggagaatggcgtgaatgcaggaggtggagcttgcagtgagcaaatcctgagtttacatctctgtgggaagtcacatcacccctatgagatgcccagcatggaagtggttggcacaggacagatgttgaatacggggttaatgggagggaggggactggccaccaccccccacagccctgcttgtattggtgggtgggtattgatggcacaggcccatcctggtgggtgtgaccagggaacctgcattagcagatggccccctggttctgggacacgcgtaggtttgggaatgtgtgcttaacacgaggcagtggttaaaacaccaaccagagtcgtttggaatgagagtgtagttcaaggcaagaatgggctgaattctgaaactctgaggtcttttgtattatgccaggaagagaagaccctttcttccttctgcctgccctccaaccccaagacctcacttctctctttccttttttttttttttttttgagacagagtctcgctctgtcgccaggctggagtgcagtggcgcgatcttgactcactgcatcctccacctcccaggttcaagcgattcccctgcctcagcctcctgagtagctgggactacaggcacccgccactactcctggctaattttttttttttttgtattttagtagagacggggtttcaccatgttggccaggatggtcttgatctcctgacctcatgatctgcctgcctctgcctcccaaagtgctgggattacaggcgtgagccaccgctcccggctgtttacttctctctttcttaagcagttggagtttctggcttggctttattcctctggggtttggggaggggagcaaaaataaaatccactcttgcccagagagtctgtggtctgctgctggaattgaacctgtctctctggggccggctgctccctgagaggggaacctggagacttgaccctgagctggagtctcatggaacaatgttgaaatggactgtaagatagtacagagctgggaggccctgggagaggtacctcccattttacagatggaaaaattgaggccccaagagaagagacataggacgtggctagggtcttctggaaagtgagaggccatgccaggatgaacaattccgactctgggaaccatttgtgtccagcatcctccttgcggccaaggctgctacgtgaaccttctgtgttgatgggcacccgggacttgcttccaccccagagcaggtgttctctgcagccggagggagagccaggtgcagctgggctggcttcctaaacagactgggccatttctgttggccactgcaggcttggccatgacgaagatgaaatgtatgtagcatttgccaagccttatgaatttaggctctgccccagcaccaagcactgtcctaggtgatggccttctttttccttctttaaaaacatacagtttcccaagcgaagcgatcaaatgaagagaggcctaacgtcatttgcctctgcatcttgtgatctctgtttgctcaccaacaacgaaggctccaaactcagcagtttcgtgtaacttgctccttaaaatcttctgtagctttttttccattttttaaattggtacttacaccaagcatgtgctacttatattatttttaaaataattttttaaaaaaatctctttatactgtttgccttagttagctcaggctgctatcacaaaataccactgactgtgtggcttaaatattgaacagaaatttatttcctgatggttcttgaggctgcaagtaccagatcagggtgccaccatagccaggttctggtgagggcccacttcctggcttgcagacggccacctcattgctgtgtcctcacgtggcgggggcctgggggagagcaagctctctggtgtctcttcttagaagtccactcatctcatcgtgagccctgcttcgtgatctcatctaagcctaatcacctcccaaaggccccacctccaaataccatcacagggaggggttagggcttcagcataagggttttagggagacacagttcagtccatagcactgtttaacatagctccagatttatgaaaatgccacagcaaagtattttagttcaggaaggtgtgtgcaggtcaaagccctcattttacagagacggaaactgacacggaggggcgtgtggcagaactggcatcaacactctggtcttctgattcccgggacggatcttcgacttctaattgggccgtgcctccttgcaaaactgtgtgtgcatgtgggttttgttcagaaaaaaggatggccttctcgaaggacccatggctttggctgcttagcctgctcttgcccattccggattcaaggcttcgtcacccgtctcccggacagtttgaatgcagcgagaatgaacacagaggtgcttggtttctggcaagccctgcctttcaccagcctctgtggcaccctctttactgtgactcacacaaagcccagaggtttctgttcacttttaagtgcagaaaagtgctgtgctgcctagtctatagggaggcttcctttgcacatcctgtcttcaccccgtgtctttcctaccccaggggttcagcgggaggcccagggaagggacagcctctcacctgtttggccaccattgtgatccttctctcagctgttgctgctcctttggctaagaccagcggcctcagggccctctgtgggcaggatttctgacatgcgctccctcctggggtcctgggagtggggggtgtagaggtcgcccatcccggcccatctcccttgtatgagagctcccctccacctcaggtccagcccccagctcctgctgctgtggcctccccagagggctgccctctcggtgggggactggcaagatggctcctttaatggatcccacgtgacccaggggagacccacacttgctggccacgccaggccaagggaatacagccactccatagccggccccgcctctgcttccttttcttccccctgccctggctcatgggcacgggcacacaggccagtctgctgcataagcaggcgtcctctgggaagggatgcctcctctcttgaagacatcccactcccccgcaaacagccctttccagccccatcagacatttcagggaattgaaatgaacatgcgtagtggttaggtgcacagtgtctggagctatcccttcagtggctacttcacgcctctgtgtttcaattcacgcatctgcgaaatgggttaataataataatacctctctcatgggtttgttgagaagattgcataggttagtgaatgaaaaacccttagcaaagtgcctggtatgcaataagccttccataaacaactggtattattattattattattgaaatattacattattagtggtagtaataataatagcagtagttatttttagtaatagtaatggtgaccaggtccactgggcaagagaactgtatccctgaacttggcccagcccaattcaacccaatgcagtgaacatttatttatttatttatttatttatttatttatttatttatttattttgagacagggtttcactctgtcgcccaggctggagtgcagtggcgcaatctcaggtcgctgcaacctctgtctcccaggttcaagggattctcctccttagcctcctgagtagctgggattacaggcacccaccatcactaatgtatttttgtatttttgtatttttagtagagactgggtttcatcatgttggccaggctggtctcgaactcctgacctcaagtgatctgcccacctcagcctcccaaagtgctgtgattacaggcgtgagccaccgcgcccagcctgcagtgaacattattaaggattcacccatgtgctcagctctggactaagcactgtgaatgtggtttctgcggaggaagcatgcgggaacagccatcccctcccgactggaagagcacacagatgctggagtgagtgagcctgacctgggttcaagtctcacctctgctgctcatcatctgcaggcttgtaaaagttatttctcctctctgagcctccatttctttcatatagaatggggatctgtgttgcctgccatgagggttgttgtgaacatccaaaggaaattaagcaggagtacaatcactttggaaaactgtttggcagtgttgactgatgctgaacatgtgggtacctcaggacccagcagtcccactgcaggggacacactcagcagatatgtacccacgtgcaccaggaaatacctatgagaatgctgatgtgttatctatggacatcctacgacccagcatttccgctcagcacaaatgcatacgtatttgcaccatacgtgtcctctagacacatatgagaatgttctagcagcatgactcacatggcaccaaactggaagttcccagttgtggatcagcagaggaatagatggatagaggtggtgtatttctttttctttctttttttttttttgagacagagtctcgctctgtctcccaggctggagtgcagtggcgcgatctgggatcactgcaagctccgcctcccaggttcacgccattctcctgccttagcctcctgagtagctgggactacaggcacctgccaccatgcctggctaattttttgtatttttagtagagacagggtttcaccgtagccaggatggtctcaatctcctgacctggtgatctgctcgcctcggcctcccaaagtgctgggattacagtcgtgagccaccgcgcctggccgaggtggtgtctttctataatagcacactacataacaacaaggttgaaaacatcaaccacacatacagaatgggtggctctcacaaacactcggtggaaaaagccagacgcaggaggagattactgattgaccctatttatttaacttaaaaaatgggtgaaatcagtctatgctgttagaggtgaggacagtggttcttcccgagggcgggagggttcatgtatccttaaaggggtcacgggtcaggggctgatgggcggctgtcacattctgattcttcatctgggtgccagctctgcaggtgtattcactgtgaacattcatcaagctgtgctttttgctctatgtatggtatgtttcaataaacagtttagttacaaaattaagtgcaataacgcatggaccaccatggtcggcactgaatgtgtgcttactgttattatttttattttctttttctcctcagcacctgaagtgacctggaatcagtgaagccaaagggactggcagtctgccctgcagggagtaccgacctatcccagttgtgtgaggctgcgagagaaagggagtgcatgtgcgcgcgtgcatgtgtgcgtgcgtgtgtgttcacgtgttctcgtgcgggcgcgtgagtggtcttcaaacgagggtcccgatccccggggcggcaggaagggggccgactccacgctgtcctttgggatgatacttggatgcagctcttgggaccgtgttctgcagcccagccttcctgttggggtggggcctctcctactatgcaatttttcaagagctccttgaccctgctttttgcttcttgagttgtcttttgccattatggggactttggtttgacccaggggtcagccttaggaaggccttcaggaggaggccgagttccccttcagtaccacccctctctccccaccttccctctcccggcaacatctctgggaatcaacagcatattgacacgttggagccgagcctgaacatgcccctcggccccagcacatggaaaacccccttccttgcctaaggtgtctgagtttctggctcttgaggcatttccagacttgaaattctcatcagtccattgctcttgagtctttgcagagaacctcagatcaggtgcacctgggagaaagactttgtccccacttacagatctatctcctcccttgggaagggcagggaatggggacggtgtatggaggggagggatctcctgcgcccttcattgccacacttggtgggaccatgaacatctttagtgtctgagcttctcaaattagctgcaataggaaaaaaacaaattgggaaatgaaaaaaaaatgggaagattaaaaagcacagggggaagaagaagagatttcggaggccatcctgccaggggcggacggggctgactcctgctctctggaggacggtcagtccatgtctcggagaaacgggtgagctgagcttggcgtttggacccagttcagtgaggttcttgggttttgtgcctttggggcagaccccaggcaaggatgtctgagaccacttgggcgctgttttctcagctccaatttcaagagtgagctatcaaacccagagcggaaggagggagctctgatgagcacggtttgtcacacgataaagggattttttttttcagggctactacggttgatcttgcaactctgtaaatatgtatgtagacacttttaaaagcacgtatttatgtccctgactgtaaatgctccatttttaaagttttataacttgtgttatttaatgagtcagtcaatcggctgcagtatgggatctgataaggatctaggagaagggtctcatgcggaccctcacatgggcagaaaaatggtggtcattggccgacatcacagttttcctgtttcccacccagctaaaaaccgttgtttgctttaaattttcataaactggaatcctttcacccgctcctacagctaaccctcacaagcatgaagtgctgtggctgttccttatcctaatgatgcgcttttgtcccgtaaatgttaacactcatgaagcataccccggcctctcagttcttgagggcctccccaccgcagcagcaaggaaagctcacgaaccccaaacctggcaagtcacctgcagcccatggtgagctctgggaagtgtggttgaggccttggggtcactccttttttgcatgtgcaaatgtgctggtcacccttcaacgctcccagacggtcaggaaaactgttccaatcatgaaaaggggggatgattttgtaaaagtggcatttcctggtcagtggtggtcttcaagacgacagctctgtatctgccatgtgaagagaattaacaataaaagtgtgaagagcgattgtgaggaacaagcctgggagtgatcattctggtttctgtgctctgtcttctgtgttggtggttttggtgggagggcggtgggggtccctgaatgctccctcccagcaacgggaggaaccaagggctcaaggaagctcactctggaaacgtcccatctggtaagtaaggctactctgccacctgccagccagtgagttgaaccacatcactaagaccagaaagacctcttttgattgcaaatatattcttgtctttaaacagatttattaagagctaatccacagatcataccacttacccacttaagcacacacatcagtggcttttagtatattcagtgtcatacagccacctccacaaccaatttttttttttttttttgagaaggagtctcgctctgtcgcccaggctggagtgcagtggcatgatctcggctcactgcaagctccgcctcctggattcacgccattctcctgcctcagcctcctgagtagctgggactacaggcacccgccaccacgccaggctaattttctgtatttttagtagagatggggtttcaccgtgttagccaggatggtctcgatctcttacctcgtgatcctctcgcctcggcctcccaaagtgctgagattacaggcgtgagccaccgcgcccggcctccacaatcaattttagaacattttaatcacccctaaaaagaaactgcatgcccattagcagttactccccatttctcccaaagcccctacccttaggcaaccacagatctactttctgttcctatggatttatctattctggacatttcatagaagtctaaccagataatatgtggtcttctgtgactgacttcttttacttagcataatgttttcaaggttcgccaaggttgcagcacgtgttagtacttcattccttcttatggccaaatgttccattgtaggaatagaccatatttcactcactcattcttcaggtgatttactttggggttggttctgctttttggctattaagaatgttgctgcagtgaacattcatgtgacagtttttctgtggacatagatcttcttggatatatagctaggagggaactgggtcatatgacaactcaagagttcacattttgaggaactgccaaactattttccaaagtagctgcatgatttcacatccccaccagccacacataaggattccagtttccccacatccttgtcggcacttggcaccgtctttttaaaattttagccactctactgggtgtgaatgtaaatgaattctttgaaggaacaaccatccctctgatcacaaatcctggcagagttaggtgtcagagtcccaagaggatggggatgggcacagggggattctgatgggaagtgaaagacgtgtattcttgggtttgggtggaaggagaccccaaaatggtctttgtccacatccaaatattgcagaaaagtaggaggaagaacccaaagttctagcttttcatttaaacacttcct

SEQ ID NO: 479 - DNA, 101904 bp, Homo sapiens
  source 1..101904: mol_type = genomic DNA
tgcgagcagattaattgaaacgggcctggaacttcatcctctcctcccgatggagttgctggaggtctgcggacactgcctggttagcctccgggaccacagcgccgtgggctttccctcgtggtgtctgccttaaacttgggtgctatcaatctatccaacaatgacggatgaccttgtcataacgacgccagtcaaaacattttcggtctaactctcttccaaccaacatcgaagcatcctgaatgagacccggatgaagtctgaacagcacgtttcccaggttcagaaaacttgagtggtgggaagagaaaaagaaacaagcagaaatcaggaaagaatggctattaattgctcagattggcaagtgctaaataagttaggttgtttggaaaaagataaatgccgtttcttctctttacggtatggccagaaccccggcgatgggaaagtacctcctgagtcggtcaatttcacacaccctgcctgtgccctctaccatctactaccgaaaatgccaggaagagctggggggcaagtgcctccttcgtgggtgcgagactgcatcgaagggctgccctggcacaaagtctggggagaggacatggtggaggtggggctgcactcccaccctgcccctctaacaccaggttttgggtagagaaacctatgcgtgacctcctgcggcagccgcaggcagctgaccgcaaacagcctcgcccgtgtcccggagcagttgtgccaccagacgtaacactggatacttgtctccgggccccaagaaggagagggaaagagccctccagaagacaacccgagaaggggtcagcagagcgctgggtggagtgcagactccattgcagccgcctcccagccccacggccaagcttgagtccctccaggaccagctgctctcggtctcaggaccctcggtcctacgcctccctgcaccgacaagcctccctcctgggctgcagacagagggtttcactgcagcgcgcaacccgtcccgctccgcccccaacttttctccccggaggatttatgttagaggttgcgtggcgggcgagtggactctggcacccagaagcacttcaggaaaaactgagccgggcaaaagcgcaaacccggtcctggcggcgcgggcttgctccagcgcggacaccacagcgtgtgcggagatgcattcccgttgccgcatttccactgctttcaagatcagggcactgagctgggacccagaaaagacatatcatgggcagaaagagacaacaggctagcggcagacgtcacgccaaaaaaacaggggatgggagggcggaggagtttgtgcgggaaaggcgctctggcgatgtgggtcgggccgaattagaacttccttcttccctctcccctccccttcttctggcctgcctcccctcccccctccgttctctctctctctctctctctctctctctctctctctctctctctctctcacacacacacacacacacacacacacacacacacacacacacacacacacacacacacacacactcactctattttgtgctgtcgtaaaacccacgtgtccagccgggaagctgccagagcgtggaaccaaggagccaggacgcggcagcggccaagcgcagcagcccacggcggttgagtcgggcgcccaggtccgtccgcactctcgcgccctccgcgggcctcccaattttctcgcttgcaggtcgggaggtttccgggcggcacaatctctaggactctcctcccgcgctgctcaggggcatgtagcgcacgcagggcgcacactctcgcgcacccgcacgctcaccgagacacccgcacgcacccaccggcagcaccgagttttcaggtaaggtgaggctggtctgggacttaagagtctagggcttggtagataggaaggttggtggtcctaggttgggggcgggcggcgagactgttctgcctcctggcgcctgaggccaacgcggctcgggcgctgcgccacgccggctcgggtcggctccgggcgctggctgagggcgggggctgcgtcctgcagccgagttctacggggcagcgccctcctgtcgggccccagcattgctggatgggagctggacgctgcgatcggggaggcagagcagggtgcacacagctccctctgtgcggcgccgcagcttcggagtaaactttgcgcccaagcggagttgggaagagggagccgcggaaccgggcggccgccggctgaaccaccggctcgggcactttctccagggtcccagtggccctcttcccggcccctttcgcccagctcacgcgccccctcttccctgccctctgcccccagttcgaggcgccggacatgctgaagcccggagaccccggcggttcggccttcctcaaagtggacccagcctacctgcagcactggcagcaactcttccctcacggaggcgcaggcccgctcaagggcagcggcgccgcgggtctcctgagcgcgccgcagcctcttcagccgccgccgccgcccccgcccccggagcgcgctgagcctccgccggacagcctgcgcccgcggcccgcctctctctcctccgcctcgtccacgccggcttcctcttccacctccgcctcctccgcctcctcctgcgctgctgcggccgctgccgccgcgctggctggtctctcggccctgccggtgtcgcagctgccggtgttcgcgcctctagccgccgctgccgtcgccgccgagccgctgccccccaaggaactgtgcctcggcgccacctccggccccgggcccgtcaagtgcggtggtggtggcggcggcggcggggagggtcgcggcgccccgcgcttccgctgcagcgcagaggagctggactattacctgtatggccagcagcgcatggagatcatcccgctcaaccagcacaccagcgaccccaacaaccgtacgtagccgcagcccgcgcgctctctcccggggcgccggcgccggcgccggcgggcgcgggtgcctgtcagggaggcgggtcggataggagtgacacggggccgggtgggtggggagcacctggtcctggccgctggcccgcgcctccccgatctctgtgacaaaagttttctggcgttggagaaggaaagagaacggatgggacggccggtggcactttggggttccctctccctccctctcctcacctgcttcacagtcccaagtgtttggggccggagtctaccgtggacccggcctaacagacctctgccctcccgccggacagtgcccggggccaggcgggtactggcagcgtgtgacagggggtgtctgggtcaggccctgcctggccttagccgggacgagggagggaccctcagcgtctctggggagcacgcagaccagggcttgtttttgctactctccaccccacctctggaggggtcattttcgggccgcggggttgtgggggaaccggcgggagctgttcgctggccaggcctcactggagtaggaattttagatgaaactgagtccgtttctccttgaaggcaggcagtattcttagatctactattcatttaaaaagaaggaaaagaaaaaaaaatgactgctacttactgagaagaaaatttctgttctcctccgattccgctgatcccgctttatccgcgcacctttgaccccgcaaacattcataacccatgttggtttatgtatttatttttagaaattagggtgactgtaatttagtaaaagacgcttactcccctcttcctccaagttaatagcaaatgcctaactaaacatcagaattcctgtagcttcggtttctatattcacaatttgaaacgcttatcacaagtacagttccatttggcggttttgaagcaaaactctaaatgaagatcaagcaatatgtactgctttatacctgcttctttttgataatttcagaagttatactgtgtttacacctatactgtgttgggagtgttaaacgtgctcccagagacttctggagataacattaaagtgtgttaagagcgtcagattgaaagcaatacaggatttgaaagatcagcattcattcagctattttcttcatctcattccttcgtctggcttctgtatgagtaaagttaatttaaaacatttatttttattcaattttgaataagttgcttcttgcaaaatgtctaccgctctgtgaacttcttaattcgttgtaaaagcaaaataagttcagttatagctctttaaaggattccctaagtcgttgatttgatgaaaaaaaaaacactgggcaactgcctcgtggttgaggtctatgaatattttcattatgttggacatagctgtgatggagataataattaccaacagaaagagcaatcgtatttacttttttctttatgaagtttgagagtaaagcactggcttaaaatagtggtttcaactctaattttgctgtgcagttgagaagacttgtatttcagagtttcagaaagttttacaacattatactctcccaacagatttcaaaaaatacttatctcctactgaatttcttgaatgtgtgtttttgaagcaagtattttaaattatgaaataaaaagatttttaaactgccttggaaaaggtatgtcttactgctaagtgaaatatagccattgcaggctgagaatgcttcatcaatcttgcaatttcacttctgaattaaatatatgctagagaagtcaccagcagtacaccccaaatccctggctgtgtgctgagctcctgtactgtttacaatgcagtctggaaaattaatacgttttcaccagagaaaacagactaattcgagaaagaattaggatagattcctaattaatatatgggtattgaaccagtttattgcctgggtaacttttttctctggttggagaaaataaattacaattttatttaaataatttatattgtgttaatcttctggtatctccttttgagccaactggattgtttcagtgtttgaagtgcaggggaaaagacagaagggaaagaaaattagattgtcctattagagttacaccccacgttgctcactaattaaagggcaattgagaaagaaaatagaaagctgagatagcgctgtgtaatgctgggagacgagatctcccattcttccaggaacttctctggacaagcaagcttaggcactcatttgaagccatgggatgtacttttacaaagatgaaacgtgattgagtttaatctaagtaggggcttaaaacaagtcagaaatgcaaatagtgggaaactcgtttcctttggcaggggaagttggcataatggttattgaaaggctgtgaaaaacagaagcttctcctcattctcgagttgtatgtgagtggaggtggagtgaaaggaagggtggaggcagagggaagctcctattaatttatcatgtatagatttccctagtttttcttttagtttttttaccatctccctctaaaagaattctgtgaagtgaccacttagcattgcttcattttgtcacttcgtacttaaaaggataggtattgagttgttttctctttttctcacaaggcgaaataaaaagggcgggatgcgggggtgcctccttacttctcccttccctttagcaaagtaactttttgcctaggatcagcaatacatatcattgctctgtaagaaaagaacttaggaacactagtttcaccttgaaactttattggcatctatggtaaatgtcacagtgatggggcttgtagctctctttcgttctaaaagattttaaaacagcagaaactgcaagctacccgggtgagcttttccagtatgttcctaactccgtatcagtttaccctgtgactgaagtacagtttccaccgaagctctgaatgctttgctgttgctgctgctgccgccttctcttaaaaatcaagtggtgcctcctgcgatataaatgggggatggggcccttccttccccgtctaatattactgccctcatttgctgctgggctgcctgaagccattgatttagtcaggctccatcggagtggcctcttcccgggttctgggagctggtgcgttgcctgctcttgaaaagtagagagagacagtcacagggcgcgcctggcgtttctgagtagcatcccggctgttctctcagcacagcccattagtttttcaggccttttttgtaaagatgtgcttccctaggacctgggagggaggcgggaactgagccactttgggtgtctcgggggagagttggaccactttgcaaattccccagttgggggaggggtctctgtcccctcccgatttactggaaccctcctgcgcagggaacaggctggaaacagcgccggtgtgtgcatgggtgtgggagcggggcttgaggcttccttgttgggaacaccaggctttccaagggtttagggagaggggctggggagagaaaagggagtctgggcctaacactggtttgtccggttgcttgctaaggggtcaaggaaagagacaaaggagggcgagtgttttctgaccttccctaatcccttcccacccaggtggaaaacgcaggtcctgtttgggcaacttcgagcccagtggcacaccagcaggctttttgtgcaaccgaggaacatccactgcgccccttctgccctgcgcctcctctgtcaaagaccagcgagcgccttagattgcagacctggtccgggtgggagggagctttggcttcagtgcgtgggcttttgtgtttctctctctctctctctctctctctcgcgtgtgtgcaagcccagcctcatcccataacacacatgatttagctattttacatctttcgttatctagcgccctgaaaccgaacatacagccatatattagattgaggttagaagaggtggcgactgtttattcaaggtgataaaatggtccatcagcagtaatctccatcgatatgtgccaccaggagatgaaggatgaggggacaagccacaattaattgccctatagttttgtaggagagagtggagccagcccagacccgcttcgatctcctctcgcggctcctattcatcatctccgcattgtatatggcagcctcgcaggggcaggggccggcgaggtttatctctgcgcaatattctctcaccctcacaaactggcgctcccatttaatttattaatacagtcatcggaagacaaataagacccacattttctccctcccaccttcttgctctcttctttttgtctctccctcttggtcccagggtcaagcccgcagccaggcagggcagagaacgcccagagcttttgcgattcgcggggagctttaaactcgcgtagagggagagttcctgagagaattcccaggagctgggccgccccgcagggtcgagactgaaatcaattggctccccttccggcggccaggcaaacctgcctcgcctctggatctgcttctagacccgctcccggggcttggaagacccctgccgggtagaggaggagggccgggtgggtggcggggtgcagtggggacgtcggatcgtgggtggtgtcggcggccacgcctcatgtcagaagagagcctttcgtgggcaggagcggggtgggaccttcaaaactcagccttcggcgctgaggcctgggcgccccaccccgcccatcgctccctttcagccatcccatctagcctatagctcgagaaggcagtggggggaccgcaggctggagccccgggggcgtgaaccccacgcgagaagttcgggcccggatgctctgcctgcccgccctctgcccggctccccagcccccacgcccctccccgcctagggcgcacgcggcactgccagcaggcggcactcccgggtcctagtcgccgggctgggatcgatgggcgccggcccctcgggtctcggcctgcgagactgagggccgcgaccttggcggcggtaggggaggatttacagccggggtggatagtggcgcccaggcggggaagcaggcttttcacctactccttgctttcctatatgcagggcgggtgagagccaacgaaggcgtcgggcaggtactggggagtgaagatgtgatgtagctctcactccccacgcgcctacacatgactgttggcctctccacacaccaaaagcccggaagcgttttatatttcacctttcctagaacgagaaatgaaattccagaaaagaaaaccatggcctgctttgccgcctttaccttaaaatagatatattgtaaagatctattgcactttaaagacattgaaacaacacagaaggataggaaatgaagagtgaaagtctgctcttaactgcacttggcctggccttctgatgccaggaggcgaacaagtctgtaacctaatgacagcaccttcctttactcagagacgcttagacaggagcattgacagatttactcaagatagaagagtatttatgaataacaattatgaacttgtacaaaaactcttcccctgattttaagagaaagtatgaacatttacttgcttccttgttaggaacctaagtagttgtattatgtattgcttggcttggaatgctctgtgtgtgtatatataatataatgacatatattatatacatttatacatagtttggtcctctcatatagcctgcttctctttcaaaccttttcatgtaggtgtttatactctgctagaatgtttgtcttcttaagcatatttgtcaatcccaagaaatgttacttgtttttaatatcctcaagctaccctgagactcagacataagttagaacccaaatgtttcagctgggggattttgtgtattaaaaaataacattggaatataacatgtatcttgatggcagttggtcaacttttctggcagaatattttgatatagcatgaagtggttcacaaattaagaagacccctgttgggtggactaattaaagttgattgactttgtctagcctgctgtggacctaacacacagatagtcttctagatattgggagagcctcagtttttcacttttaatagtagcataatgctactattaagtttttcaactctttatggagacaaatgaaacaataagttgaagacggctttagaggacttcttggagaaaggccttagccacagttttattatcatgcattacaaatattagaagtgtgctttttgtctatggaggtagtggctggagttggtacctatgctgatgtcgttgatgggatgacacgtgtggagaagcatgttggaagttgactgtctctggcacaggctgctagggaatgaaaactaaacactcttctgaccatttgcatcattgagtcaagcagaaaaaaaaatcagttaagtaactccctggagtgacttatttctatttccatgggcatattgcctttgcttattgtcatttgcttttagctatttttgcaaaggtgctgaaaggctgtctctgaagtcagacagtaacattcaaaattatagacattatctatgtattttcctatccaatctcttactttaatgtccgaaaacacaagagtgtgggaaagagagaaacctctataactcaatcatgctacagcaattttcatggcccccaaagttacttcagtgaaatatttcaattcaattgagtcatgagtttgaatgttaaatttccccagctttcattagtcttttaaaaatctctgggtttagaggccttgcagtcaggcagccttgactgtgaatcctttctctgccactttctagcttctggttcttggtggagtagtagtgcttgggaattgctttatctgcagaatgggaatcatgatacttagataatatgctggtttttggttctagacaggtgtctgacacatggtatgcactgtaattgtgtttattgtctttcatgtaattcccaaaatgtcttgaagtttttattttcacaatcaataagcttgagagggtgtgtgaagtgtgtgtgtttcagaggagttgacatatggataagtgtgagaatactcccatccaggccctggggtcaaaagcagagtctgggagaattttaacaatagtttgtgttgctggcagaggaaggacagaagagggcctttgtgcaagggaggcccagcggcatggacacttctctgctttccgaaacaagttgttgcttttcacttcagaggtctggggacatttctgagaagcttgcagccctcattcttccagctctcttgggaggagtagaggagtagctgctgactgaggcaaaggtttggctggctagagccccctccagtgagacaggaggcttacatagtcagccctcctttgctgtgaagcaaatggcaaatcgagggctcccttaccatgctgggttgcgattagctgttcctgacacaaacgtttcatacagactcacaagtttcttgggcatttcggtcatttcagcgcagatagggcacatccagggtgatccaacaggcctggctgcggccaaggctggcggcggcaggtacccgggtgccccgagggccacccgccgccccgctctggcgcatccatcagtggccagctttcaccgtgtctgccaggcgggactcgccaggtgtcaggctcagtgccataagcctgacacttgcgcggggtcgccgtggctcctcagggaagctgggccaaggaggctgggtcgcgccggcgggcgccgaggccaccttctcggggcaggccatccgcgctgaggcgcagacacggcggctcctccaggcccattaataacccggagggcgctgcgatccgacagcgcagtcgccacaggctctatttcccgtggccgcctgcctccttccagcccagttcgagtggagggatactgggcgcccactaccgcccggcccggagggtgggggtccctctcgcgcaggctgctttggagagtgtcggagagagacagctttatctacagcttcacccattgtatagcacaacagaatcgcatttagcctggagaacagccgtcggggcaggagttggtgccttctctaacaattaggctgatcgttaaatttgctattcctttcttccggcgtctagggagagcgtgcacaccaaaccctccagaacagcaccccggtcccccaccccgccccacctgtccccgccctgcttcagtgcctggagggagaactgactggtcgcttgagggaccccatttcgggcgcgcccttggagtcctggggctgcggctcctgctctaccgggctgcaggcttgctctgccccgtcccgtggcgtttgggaggcagtcgaggaagcctccgagtctctgggtcgaaggaagtgcgaatggcacccgcgatagactggccgtctcccccaccccgccccgtctggtgattttaaatcgtctcctgtgtaattgtaaaaagaggaaagctgaatacccagacgaccagtatagaatctcttcgagacagcagattgggcaagagacgggctttttttcgcaatacaaggataaacacatcctgaaactccagatagaaacctcaggaatgggcgagagggtcagaaggaacgagagacagtagggaagagagagagagagacagagacagagggagagatgcagagagactgaaacgggaggaagaagcctggaactgtcggttccgtggagagcggacatgctatctgcgcccagatccgaaggctttttggggagcctagagtcctggcccggtaccaggcagatctgggtgcggcgaattccaagggagcggcgcgggttctcttctcctcctcctctgagttgcttcggtgcccccaaggcatcaccttcctcgaaggtggcttacccaggcgggcggtgatgctgttgtctcgggagtttactcaaagatgggccgctcggggcggccggattaacccgctcccttcccttcctccttcttgtctcccgcaggttgcgacatgtgcgcggacaaccgcaacggcgagtgccctatgcatgggccactgcactcgctgcgccggcttgtgggcaccagcagcgctgcggccgccgcgcccccgccggagctgccggagtggctgcgggacctgcctcgcgaggtgtgcctctgcaccagtactgtgcccggcctggcctacggcatctgcgcggcgcagaggatccagcaaggcacctggattggacctttccaaggcgtgcttctgcccccagagaaggtgcaggcaggcgccgtgaggaacacgcagcatctctgggaggtaagtggccggctgcacagcgcctccccaccgagcaggagccttggccagcagggagccttggccggcagggagcctggcctttggctgtggcaactgcgaagagagcctcccttggcccccagagggtagcggagaatagatttctctggtcctgtagatgcctggtgtctgaagcacctgcagtaaggaggctgacagagctgggactgacacaatagcaacccagccagggaaacagcctacaggtgtctgaagacagagtcaccttaagctgcctccattccagctggaatggatttgaccgttggtctctgtgaattttgagaaaaagagaaaacagctgaggagatggagcagcggagggtgggcattagaatgtttgagctgggtgacctttatgtcccattccaagcacttccagtgtgtttctgtgtagtgagcagaaaggaacagaagcatagaggggaggaaggagaggctggccccttttctcagataaaaacaattttgtcaaagttgaacgtgagagatcacatgtttcacaactttcaaagggcccaaagtaagcaaattatattgggaatcaaagggcccaaattaagcaaattatattgggaatcagaaatcgcaaattctgctgcttctctgatgaacggaaattatgtaatcttcatcaatatggaaaatcaaaacatgggaacagtgtgagcactttggtgtaacccaattgagggtaatactttaatggcacaatcttacctgaagcaattatttaaaaataacctatttgaaaaatgtcagcctgaggtttctcccaaaacatcatggtggattattgaggttcacttctgaagagatagatgcctatcattaggtcatccccctaccaatcttagccacctccatccatggaaagttgcttatgtaatacaagatgacagaagtcatacccttaaacaatatgtaaatctgactaactgggcaagtggtataataaagtaggaatagctagaaaataaagtttcttaaatgccaggggtcaggttgacatgaacccctgggctccattaatgcatcgtttctgcaagagattgcctctcatacttggcttgctggcctgtcaaaatgatctttttcactgtgagctgccttatattcactaaataaagctcatgggactcattaatccactcaaatttttgatgagtgcccactctggccagcactatattaggccatggagatacagtatgaaaaacagacctggtatccggaaccctcctgtgactgttggggatggggtcctgaggcctgtgtctgcaaagcctcttttgatggaggaggagctgagtgtatgagtctacagcccagcagcccaaaatgaggacgtggaagccaatgaactacctaccctatagttatctgctggagtgccccggctcaaagcatctggtttggaaacattttggtttttgtttctgactaattaattgtaacctccaatgtggtttaaagtttataaaacacttttaggtacttctcatgttccagtagtgttattaggaactctaatatcatatagttaaaggtctgccaatatttttctaagaaaatcgtacagcaattgttcaatagtacaaatttactctacctgaaaatgttaaaactgaacactattatattgccctttgatgcctatctatttttagagtgccaggggacaaagacataaacatgaacaaaaatctcatagttcattgtgggttttttcccccccagaaggctttgaatgattgggatgttggcaggaggccactacacatatagactataacaatgcatattaacactgaaaactatgaaacctttcttttctacctttacttgtacttgatgaagttaaaattttgttgtagtaaagagactggggaatttagtcagtgtttttctttttcttgatacttcagtagatataaagtgaattttatctattgttcagggcatgtgagttgagtgtgctgggatggttcttagagttggttctctgttagaaaaaagacttgctgggtgtatgcttggatgatctacaggatccaactcctaaattcaggacataatctattttttttaattatctgtaacaacagttagaataaggtacatttgggaattgaagggattttaaaactttagccatacaaaatgtgtcagtctcctgggagatcacgtgaaatgcgactaactggggccaggtaacttagtgccaatatccatttgtaaaataaaatacttactttataaaataggtttcagatttttattagcataatgatttttaagatatagaatatgagtttaaaatttttaagcattatgatttatttttatgaaacatgaccgtttgaattgttacatttataatacaatattccaaatgttagattgttccttaaattttagttctttctttcaaagctaaattttcttctgaaatttaaaaaaatcatcatattattcacattagaatcagtaagtagaatacattgtaggtctatcggaaatgtttggcaataattgtttaatgactcatgtaataattatccatttcaaaaacttattcttttagatgtcttccagaatagcaagtcaacaaaatgtattaaaaaaattaaaagcagttgaatcatgattattttattttaaaaggcaactgtaatcatttctcttcctcacattttttcaagtcatttgctgatgaagaaatgtctttttatttcaagttcaatactcaggtcctgatggatcttaccagggttacttatctttatttcagtacaataaatggattgctaatcttttcctgtcactatttccaagtagatgatggatttttgtttcagtttacacttcattgtttttagtatggttgtactttattatacacatgaaggcttattacagaaacaatcagattcaccttagttactccttttatttaatcattagaagctctattttctttgtagaaaaatgactttttgttatttaacatacatcagccatggagagcttgtttggtttgtaagcatgcaatcattgttttagttaatattttctttgtgtataatcatagttcttcaaaatacagcaatttaaaggaagttaaatatcatttcattatattcagtacattttgactcttctgggtatttatgggaaattccaagagagttgttttttctttttttgcaataagccaaggtaattttttattttttatagtttaagaagattacaagctaaaagccaaataattagtcatttatttttgctagtttcttttagaatcagaattttaatgtgttttttaaacaataataaattcagatactttaaaacaaaacattacaaggtgcatcagacaatgacttgccttggttatatatatttattccaagacttggatgcatgatacatttctagctatttggacatcatatgaaataaaatctttctcaatgttttccaaagaaaacaatctttctcagcaattaggtcttattgatgagaatgagataattttatcctaatgtgttttccaataaagaagtgaaaaggcacatttgattccaacatttatgaaaacattatctcaattattaatgtgccccctttctcttgagataaattaatctagttgcacacggtttcctctttctgcttaacatcagaatttaatatgactggacctgaggaatgtacccagtgtatacttaaaattctactggaataaaatacggaagtttaaaataaggttacagtttaagataggctagaattactcaggcctttcaactcagtgcctgacttgacaagaaattttagcaagaatgacaaaataaattgcacttattttcaccctagaaaaattatcctgctaattgaaataatgtagtgacttgttagtaatacagttaagatactagaaagggctttaattttacagaacctgtcttctctttgcctgagtaaatttgagtgtctcgttttcatttgcactatgtggaaaccttcattatttttcttcagaaaatcaagggggataacataatgtgagcctttttgtgatttggttttgtgccataatattttagatttaataagagttttgctgttaagcaaatggtctatttttcatcattactgcttagcttaagtcaaaatatattaatgaaaaccaatattaaaaatatattacacattgctaaatgtttatatttcaaaaccatcataggtaattggttctagaagaaaatgaattgatttcatattttaaatatattatgtatgtttctataaatgactcaatttcatatatacagtactatacccacttatatgtatttagatgttgaaaaaattattttaaattaatcattttcaattaaattagaatcacttaaaagttgtcgcagtgatagtactgtaattatatattccatattctgctttatagactttggctcattttggcgtgattcaccaagacactaggggatagaattatgtagctgtcgcagttatattgaagtaaaaatcatgtttttcagcaatttatcatttaatataatagtctgcctgtcagtttggttttgaatatgtcaaatttgtgaaattcaaataatttctccttaaaaataaaccatagtaatgctactattatgttttaaattatgcagagtaacagctggtgtatctctctggctttgcctcatttgatttgaagatgtcttttatagtggtgcctatttgatagagtgtgagcattttgtagttttacataaactgtaaaaccatctgccacctcttggaatggtttccagcattgtgttaaaagtcaaaacttagtactttaagttgctttgaaaatgtccatttaaagttctggtccttttggtttatgtatcatgctgcacagtgccacccttggttttctaagtccgagaataattctgctttaaaaaaaaattataacagccatttggacattctcacatcagtgaggtttaatcccaacatgcatgtgacactacagtgctttagctgcaaacactttataaagactgatgagttctgtatccaccggattatttttctcattagttcagtttatctatttttacaaattgcttcttttatcaatagcattttctcaatatgaagaaaataattcacaaatatttactggtccataactgcatattttcttacaccatgtaatttttttttcttttcccacactgacttaaaagtaaggtataaaaagagaaatcagtatctcagaggttagtgggtaaatgaaacctgccctccccagtcactgcctggcagcaagtgatctgatggaaatgtcataccataacactggtcccaagaagcctgcaggggaatcttcttatttcactgtgtaaattaaagcagttttaatttgagaatatctattgtgttacccagaaatcacttacagttgtagtataatatggattaaaaattgttgtgattgaatatgaaaaactacacattactcagctggggaatatgcctacaatatcaaagtcctcttgtctcagaagatggatttaatacactggtagtatgggaaaaaccatttgctattctaaagaaccctatatgtagaacaactatgagcctgcctccttcgttctttttctttcattcttttttaggatcgtatataccccaagatttcattagttcagacattccttgtatatttacacaggaaatacagacttcggtataagtacttagcataaaagtcagagaagccagagcagaatatacttttccttgtaagcatttgccacctcactcaaataagttacagaattccattatccaaattgttacacatgtgtgacagaggttgacctttcgtcatgtcaatcctttttgtgtaggccccaggctccagcctaatggctcaaaccctgatttactcactgtaataagggcaggaggtcgagcaattgtcaggctgcctgttcgtactcttcttggagcctggttgaaggctgttaacacaaagcttttcaaagtgaatttacaaccagcaccactgacagaggccaatcagtgcaccataaatgtcaggttagtgagattgagcagtaagtaaagtactgacagcacactattggctggaatcaattggccaaggtttaactgagaagagcaatctatgtgtggcgggcttagggaaagagcatagtgtgcagcctgggtttccaggtagactccatagatttactggttagtgggagcataagggttgggacatcacacacatttgcttcagcgcatccagcatcatccatgttgatgtgatgcacaatccgggagttcagtgtggccgggcctcctgactctgaggcttggtggtaaaaaatggcgcagcattagacaaaaaagagagagagaggaaaactgttacagtacgaggctgtcagaactgggggacacatccagtgcattacagttcaatgacaggtaatttgttcaaattccaaaactgtaacagggatttccacaaagatacagacacaaataagcttgctcttttgctcttccaaaggctcagcagtgtgaaactttcatggaagtcactaatgcgtgattatgggttgagggtctgaatatccatgagatgtggtttccccaccagacggaatgtttttatcattttgtgtaatgacagcctggacaacaattcatttagctttgaaggcatcagcatgaaaacagaggaatccattaaaatgctgtatgcaaggatttataaattaggcaatttccttgattattgcaatcatttacaaaattgatcattccagtgtggtatagacagatttcagcaatgatcattgacaacaagcacattccctgacatctatagctgctggtcactaaaccaggttactcttccccccaccctgctgttcttggtctcaaggtcaggtggacttttcaaggaatcttacaattatgaaatttcatttgtcttcagaggagacccacctaggctgtgagagcaggtgcagattgttttaaaggttacatcattgtttttggagttgaattgtacttttgggggagggttttgatcatacgtatatgcttcaaatcagtagcacagattttgatatgatgccaatttaaaaggaaataatttttgcaaattgcacctgtaaatatttgtttgattgcagatctaaaattcaataatgtatttatttttgttggtatttagaattctaattatccaacagatatattgtggaatcactggattttaggtcaattaattttagaaggcctaatacattgttacaagtgtgaaatgctcaaaatgctgcaggttttcctatataagaacatacacacatcaagttcacttggtgctttatcactagccacaaaccacagagttgcttttattcctgaaatatcagaaatgggcatgccacatgaatctgcagggctctttccaatgaaagctagccatgtggtttatgcttagtacaaagtaactgactttgagacatttgtttctaatcatccttttgttttcagtcatccttttctccctttaaaactttaacacaaactgggacttgtaaaataataacactttagaaaattgtttaacacagtgttgggaatacaaacaatttttgttctgatttttgtcctgtttgtgaatacatagtaatttgatctcaaggtagttctttgtttaaaaggggaaatgttgtatttcaggaagtccagtggtttggtggcaccttgcctttatttgctaatgttgcctaagtcagaagttcattttcatttttagttagttgtaaaactgactacttagaaatttagtaaaaacgtaatattttcagtcagtgtcttgatattatctcctcatttttaattaattttttttcacagcatttctggtttctgttaagacttaaaagctgcgtggttagctctgacttgggtgaactgtgatgaggcactcagtataacacatgcttttcccagtgcctctgtacatttatttagtaaaccaaaatctatagcatgcaattgtgaaataatgatatgggatttggcccattttattaaaatgagcagtgtttttcactctctgtggtcattttaaattaaagctgcctcagataatgaagtatcttctatagaaacatccagtgtaatctaattcagtagaaacgtcttaagtgctttttaattggaatcaaattaaatgtagtcaagtcatgttttcaatgtcttgtaaagcaccaagagctaaatattgttagcacacctggaaatattaatgtttatcacaaaagaacagcattaaattatgagatatccatgtatacttcaaaatggtagatagctcctaaacaaattcaaggttagaatacaatgcttttggaacctgttgtgtttgtcccaaactaatattaaaatttatttatgatattaaaatacacaaatagtttctggggataagagtcctgaaaaatattgggctactaaggaaagcacttaatttcaatttgttgcaattaattgcagagtaaaatttgacccagataatccacaaagtggaaaatctcaaaattaagcttaaaaagcggaaattaatttttatattacaaataatgtgctcattggaaagtcgaactatgtaagggtataaagcagtggtaaccattgttgatggttttcataatgggtttttgagacatgattatataatatatagatttatttcattgagtcacagttttggtaaaagatatttgcactatctctttgatactgcaaaacatcttggaaattgcaaccaatggcactgttttcacagggttccagtaaatgtttaaatttggctcacccatgaatagattttcattttgtctagtcttatcctctccactctgtattctcctggtggaaaattttattaacagcctgcagacccttctgatattataaaaacacttctaccaatatcttcatatattttatagcacgtgtctttaataaaaacaaagcgtttctggggtctatgaggagattataatggtctccaggaaaggaaggagaaaatttctgtttcctttttatacatgaaagtgttaacaaaaaaagatcaagtatctttgaaatgctttttaaggtagggagacattaatttatccagttgtggtgagacattagtgaaacaacttaatttctttatacctcttttttccccacatgtgaaggagagtaatattgatggctatgtaaattacagagaaaatattgatgacttttgtgtagtaattgagattttcccccgttttcagttcgattttaatggtaaattttgtctctagtggactctgcacatagatataaagagtatcattatttgataaaacaaaagattgtatgtattaatggtagaccatgatacatcgtttggatttaattacttactaaaaactcaagtttaagtaatatttcagtgtaaatttacttagcaatgcttacaaataaaaaacaattatgtactaaagggataccatgcaacatggatgttaaaaaaaaccccattggatggctctcatttttaaaactgtatttttaatggagggcaacaaggatgactacaaatgttggcacatttatatttcctaaatgtacctgatttcagtaagcaaaatgctagctgaaaatcctcacaacaaagaaccaacttgcaagatgaaaatgcgagaattactcagtaacatccagaaaaatcataaggaagccctaacatgtgaagcctttttgaccacagacctcaaatcaggagcaattcattaggtaggtttgacactggatattgaattctgaatagaagatcatctcagtgtccagagtattgtgacctgtccataaatattaaatgacaacaaatcaacatagtggcatatttggcactgtctgtaaaaatgtgtgtgcagccatatgtgtacttgtgaatacagacataacagtatatcatgcaaattctgaatatatgtcactgttgaccctgtgaaaagcaagaattccaagtgacactctgcagttagaaattttagatgaaaaaataaacataattgccaaaacatgtcataaagaacaaaaattttgactaaaattaatatttttcctgatatatatttatttcatattaatcatttcctttttttttttttttttgagatggagtcttgctggagtgcagtggcacaatcccggctcactgcaacgtccacctcccaggttcaaatgattctccttcctcagcctcccgagtagctgggattacaggcagctgccaccacgcctggttaatttttgtgtatttagtagagatggggtttcaccatgtgggccaggcgggtttcaaattcctgaccttcagtgatccacgagcctcccaaagtgtgggattacaggcgtgagccactgcacccggcctactttttttttttttcttttttttttttttttgagatggagtttcactcttgttgcccaggctggagtgtaatggcacagtcttggctcaccgcaacctccgcctcccgggttcaagctattctcctgcctcagctcctgagtagctgggattacaggcatgcgctactaggcccagcttattctgtatttttagtagagactgggtttctccatgttggtcaggatggtctcgaactcccgacctcagtgatctgcccgcctcggcttcccaaagtgctgggatttcaggtgtgagccaccacgtccggcagtttttacttttatggcaacctaagcaggggtgatactcaaactatgtcacgaccaatccaggttagtccctgagcctcacataatcctagattcccacagtaatatctgtgccccatgatctgcatatcagctctgaatctaggatagctggctgaacttcagcaaagctattcaacaaattaacagtaataataataatatatattatgtgtagggtttcagatatgcaagatgaaaacattctggagattggttgcataacgatgtgaatagacttaacagtactaaactgtacatttaaaaatagttacaatggtaagttttgtgttaggtatatttattttgccataatttaaaaaaatctatgttttcaatgactttcctgcagctcagtaggtctcaacctctagcagggagtcaagcatagtgcagtctggggacctgcccctaaatgatttggactcagtggtcctgaattgggggtcaggaatctactttgttaacaaatgtcccaggcagtcctgaaactatccttaagaaacaaaacgccggcagggcgcggtggctcacgtctgtaatcccaacactttgggaggccgaggcgggcggatcacgaggtcaggagatcgagaccatcctagctaacacggtgaaaccccgtctttactaaaaatacaaaaaattgtccgggtgtggtgacgggcgcctgtagtcccagctactcgggagcctgaggcaggagaatggcgtgaacccggggggcggagcttgcagtgatccaagattgcaccgctgcgttccagcaggggcgacagagcgagaaaacaaaacaaaacaaaacaaaaaaaaaacaaaatgccagtctcgtcctttctcttccttgccccttgtggttgtttgccccgcttcctgcctcttcccttgtctttgctactcttgagctcacctggcctctcttctgcttcaggtccacagttggtttagttctgttaataatcctgtgttaattccagtctctaccttgccttcgcccctgctacatcttggctaatctcctgtggacatttccaatctcctcccttatcacctctcccacctccccagatatagatagatgatagatgtacatattaaagaactactaacagacagcaaaatgaactcccatgacttccatctttctgtatttcagaactccgcctggctaagcataaggaggcagccaaaagggcagaaaacactgcgtgtaaactgctgtgtgtaattagctcctaagtaatcagggtgtacttccagaggaagtggcccactggaaggtgtttggcagtgtacaaagggcctgggttctagctctcactgggtgtgagctatgtgaccacctgcagcacaccttaagtccctaagctcttagcagtgctgcatccagcgacactggcctttccacttctcctgccagccccttcagtgcagtcctatatcatatggagaacccatatgttccttgcatgacatttgtgatttgcagtctgttaattttccatatgccagctttatctgctaatttgctgatctttttccctcctcggcttcccattgctgctgttgatggaagtcatccgagcatgtagcctgttttctgttctttctcacacccggagagctcacctgttcttcttgtttcaattgctccccaaaagcgatgctctcagattcagtatcccgcactgatctgtcttaaatcttatatccttagttgtgaacatctccatctgaaagtcctgacattgtttcaaactgagttcactaactgctggcactcacatctcccctaatctttatccttatctttaatttatggtgctctcttagtcctttttaacctgtgaacccaacattttagagttactctaatggctcttttttttttttttttttttttttttgctatgctgtattcttcttttatttcatgtgtgcaaatttaaatttatgaagtcaatcattagtgccacaactatagcctgacaatttaaaatttggttcacttttatagtaaacaacatctcaatctaatgtttagacatttagctgattgttaaacattagctaaaatggatcttttcctgaaacagtgttgccaggttttaaaatattaatagacattatgttgtacacttttgaattaacataaaaattgaaggacgttagtgcagaaagttctcatatcccttccccactagttttttttcttttaatcacatcttccattggtgtggtacatttgttacaatgactgaaccaatactgatgcattactatgaagtaaagtccagcgtttacattatggttcaccctggtgttgtacagtctatggattttgacaaactcataatgtcatttatcaccatgtaaaagctttttttaaatgtttatattcccagcagccaagaatgcctagcatacatagagcatttaaaaattctctttatctgattgcaataacgagagctaacatacttaagctgagactatctgccaggcactctgctaagagctttgcaggggttattttaatttattctcacaatgacacaataaggtaaagactactgtactcatttttcagatgaagagccttgttagatgtaggcactgagagccttttttagatgaaggcaggtaagtaacttgcccaaggccgtatgtagtaaaggcaggatttccatgtaggtgttgtggactgtagagttcttgctcttcaccggtctgctctttgctttctgccccttctcactatctggcctgtactcccattaaattacagggcctcagcctctgccacaggcctctttattcagctgaccctggcctctggacccggaggtgagctttcttttctaggtggacactgcactggtttttcagacagagcagttatagcttcacagagaccccatggctcaggcccttgacatggttagcctaccttgtgttccagggccatgggcttcatatttattatcctagaaagtttaaactcagcattcagagaaacacatttatggagaacctaccatgcatgaggcattgtacaggtcacaaggatggaaaataccaactctggctttcaaagatagtaaagtagtagaggatcatgagtaactccagttgggagcagtgtgcaaaaagtgcttttgaggtgcacagaggaggcagaggtgacttcccgccagaaagattagggaaggagggagagtttgacctggagaacatagatggctaattcatggagtcaaggatctgaaggaaagatgcccctgggagagggtcagcctttcattggtggggctccactgtctttccaagcccaggtctgcttcctctgtcagcaacttcatgcaaactaatagaagcacttctgtttctttaccaatgtctcgctaattttcactgctgtgattttgcctgtgctatttatttacccacaagactctcttcttattctggtcaacccatctcttttactattttagagtcacatctcccaagaattccttccaggctaatcccaggtcttcaccaccctttccacactcactttccttccagcatccccttgagacttgttgaggttttgctttctctcccgatattacttgtagcctcagtcagtttggtaagcttatttgggaaatagttctgctaaaaaattaatttttttaaatgtagaattcaacattgactggaggtccttcatttttgtatgctaaatttgatcattcaggtttaagattaaggtaacagttgaggacagacacctgatagaaaaatgaatgactcttgtgactggggaggccagggtgctgaaagcctggtgttttcagaggagcatggtgggaaataaggttatggtagttggggtcagataaattagactgtgggaaagacttcattttattccaagtgaaatagattttgagtggcagtagtagcatgagctgacttatgttttcaaaggaccactctggatgcttggtggagaacagtctgtagtggaacaggggtggatgttgttaggagacactcagaggacaggacgtggctggagaaataaattaggagttgtaagtgcatagctgttgtttacatccagaagactgcttgaggtctgcttgggtgagggtatgcagagctttgactagaggaggtgtaagacatctgtagttctgtaaacctgtgtgagtcagatctgcaagtcaaatgtgggctaattaccatgtagcaggtgtagttgtggatgcctcatctcattcccctcccctgacaataaagggaagagccttacgtttgccttcatggttgctgtgactcagtagtgtagtgacgttggaatgatgctgccactcctaaatgtgttgcatctgtgaaccatggggcctttatacttcccaactgaggccataccagaatccttctccaaggaaagggatgcctaatcttacatacctaaatgttgtactgaaaatctcttttacctcctctactcatagtgagccatgctagccacacatgggtgcagatacacatgggcacacgttcacacgcacacactgttatcaaaatttttgcagtatttttcctcactttaattatgttttatcattacaagggctgaaaatatttataaaatggaattttgaaagtgtagaaaaatattttaaaaagaaaaaaacaagaaaaacaaatttggtgtaattcttattgcagttagtattttctttaaattcatagatgaaagcatgctgcttgtcctcatcataaaaccatgataagatttccccatattgaaaatctttgtgaacataatttctattgactccatactcttaatatgattgaatccaattgctcaacatttgtgttggttctttcctcctccctcttctcttccctttctccctttctttcttctctcctcctttccctgatccctctctcctcattttgaaaatattactaatcatttgttatcctgagcatattggatcatgcttgccaaaatacctgcaggaaaagacacagaggaactccctctatactaacaacaataatagtaggaataacagtgatcatttttgttgatcactttttaatttacaagagatttcatcacaactggctgactgttttgttgctgtgccctctcaaatgcagggagtgctccgtgctgcctggtgtgagtgagatagggaagctgtggatcccggaggctgcttgctcagttcctctgaaggtcgggtggagctggctcttttgacccacatgctccaggggagctttccatctgtccaaatgttagcctggaactaaacgcctccacacagtgatgaaatccctaacaaatgtagtgacaacactgaacataaggccttaatttttttcaaattgcttgcatttacagttaattcagtttgaattataagtcacctccatgtgaatgactcatgcactcattattaggagctttgcattctaaaatgtacaaaacagagaggagctggtttgcaaactcggcatcaccaaggtaatattaaactagtttcaaactaagaaagtggtttcctgtcattgcacatcttgtattccagatccagagttatcaaagaaaaccgtcatatcttttaagaacacctttggatcactgtatacagtagttattggaggggatatgtatggaaatcaaactcaattatgtagcataagtgaaaaaaaaaattatttttctgttacaagacaatttgctttaggccagttgaaaaccttttccaagtccagacctgttgggacctagagggacggtcaggctaggctttgtaagttgtgatggaagtgaaaaaatgacttcaaaagcaaataattttaacactgtataatagactggggagaaatagtaaggaaatgcccagaaaacaaccatataaatagataattgctgaaatatttggataatttcaagaaaaagtgcaggctaaatttttggacagtgaaatcagctttccataataactctgtctcccagccagtaatttccttgttctccctaatttacttcacttctctgtagctggaaaattcctttgttttgtaccctaataagctggctctgcagccactaagttctattgtgagattttgtcttgcctcctgcttttatgcacataactggtccctgccagggagctctggagcccccaaatagctttaagctttctaatgacttttcccaggggtcctccaggactgcccggcaacccaacagttcatttaaatttggacccaagtccagagtaactctagggttatgtaattttaacagttttagagctcctagtaagggggtaggggtggggcctggggaaaaaggcaataaacatacccatacccaggttatctctactagggagcttatggctaaagtagtcacaactcggattgtcctgccctagaaggcagtgggtcatttgaggtacctttggtttttggcatttttttttcctctggccaaggcagtggcttctacttccgaaaactctgtttagtggcctggcatgatggaaattttcataatcttgactggatcacagcaagtttgtgtctgaaaagtttaaaaatggggacacatgagaaaggactagataaccagcaggaaggaagatgggtttctttttggtgtccccatcacctttcctgtttggttagagtcactgatggattttcctcagattcgtcctgctggtgtaagaactctaaagctaaagttctgtttaatcttgccaaagttgccagagcaaagagcagccacggagtgtgtcacgttgggatgaatgtgaaggcctaaacagcatttgctcatttgctttgcatgtgcagtgactatcataccaagagctggaccagaaattgtggattatgtaaagtgctaatgggcgcagttccgattttggaggagcttacaatgtgataggggtgagccattcattcaattattcaacatatatttgataagcttctcaatgtgccaggcactttaaagggttgtctgaagatagcattgtcttagaaagacacagtccatgactagatggagcttacagtctgtgagggagacattggatacctgaggaagatgtttaagtgaacctgggcacctgattttgaaaatccagagggataactgaggagatgaatgaagagccagttggggaggtgagtcaactcaagcctcctctggatgttagtttgcaatcaggtttttcaggattagtgtatgtggaatagtaatcatgaagagagatggaattcaagttgggataaatggcaaatgcaaaagcccagaggaggaatgagcaagttgttttgtttagaaggttgacttggagtgtggctgtctctcaataggctgatattaagaaataaggctgataaattggagtcgcatcagtgaacttcttgaaaactaggtagagagttgcggtttgagatgcaaataggaaactacaacataatctttaggaggaaaacttgaggagggcagcttgcaaatgaagagaacatgggtttgactcaacaagtaaggtaaaactaggttttgcaagtttcaccaccatccaagctctccccttcatttgggctgataaagattacgataagtctggggacatccctgaacccttgtgaatttcaatgaccaaagcacagactgtcttacacatgagctgtcagtcagggtgcacagcacttttagggcacttgagtgttgtaatgtcttacatttggtagcattctaagtagaaggacaagaagtagagagcaaacaagtatgggtagaatggtgctggaatggggaagaggagtctaaggcagcaattttctgccctagaattttttttcttttctttccttttctgatggtgattgtggtaacatcacgcacaggcacaggtatatgaccttctgttggaacaaaagaggagtgtcttaggttttgagacaaatgaatgcatcttgctagatttgggagctaagtatcttggctcttatgcatccttccacaaatggcactgagttgtgttcaaaaatggaggaaacaaacaaaaaacaaagaagaccccacctgtgtaggggcttggagttcaaagataggggtgatggtgttcatatgatagtagcagaaaaagttgaataatgcactggagtgactgatgtgtagtaggtagcattaactgttactatctcctacccacaaataaacaaacaagaaaaaaactagcctaaaccgacatccaaactaataagaaaactaaggaatgcaaatgtttaaatgagtagagattagagtagggaaaaaacaagatgagagatttaaaaaaatgaaacaagaacaaaatgagtgataagggttaggacttgagaagaggacgtgggcaaaatgatgacagtttctgagaaggtgaggaaagaagtgaagggagagacaggtcctgaaagccgctggtgctcaggcgcccactgcaggaagggcttacagtcctgccaccttcagggcggctctgtggcttcctcagctgcaacatctacactcctgctacagtgaccagaaacttctgccggtgatgcctggccctgccccctcttggaattagaggaatgcatctgtttgtgggctggagattagagcccagggtcggggactatgaggaaagctgtctttttgggtggcctcacaagacatgcttcagaccctaagctgatacatctaaacttccttctctgataatctataattttctgtttttagaactacattgtcagcggtgtcagagagacccttctcagatgattcagccatttaaaaccagcagtaatatcttttgtttggaaattaagcaacagaaaggaattcaaacagtcaagctaagtagacgcattttttaaatgaaaatacatgagtggttatactaccaagttaagtcaagtcagttttattccagagctttaaacaaggttaaaaaattatattttaatttatttgcattttttaacttaaaattttttcattccattaaaaaaagtttaaggtttttccctcgtcctctctcctagaatgcttaatatacattaggtatcttacaaagagttattggttgattttgaatattttttattctgttaagggtatttatttatcctcagttaacttctttccaaaaagatttaaagtgggtcttagaaagccgaagtttagagatggataaatgttttgagaagatgaaaatggaaaattttaaagaggaacaaatgtgcataatttaaaaatattctagatgctgttttgaagccgtcctgtgttatgtccaaacagtgttgttttgatgcagttacctggtgtcattctcctctaggaattctgctgtttggttgttgagtggaaatggtgtgatcatgatgtgatgtttgtcctatcctctggaggcagcgtcacacagtggacagggtgagaggtgtggagttgagcagttcagtggggtggtgggggtagctgggattttattttttaatataaaattaagggcttttcctttattaaacaagtaaatgatgttcattaccaaaaattcaaaaattacaggaaaaaattttaaattctcacagctcaccatccggaggcaaactctaaaattttaaatgtatttttccttagaaatttttacatatgcctatgggcatgtagtatgctgaatagacttttaactttaaattattatctaaacatgccctagtgtaatttgtattctttgttaccattatatttaaaatattgtccgttaaatggacaagtcagaatttgcttaactgtttccttactgttaaacccttagcatctaggttaatagattttcattattttagtgagcatatttggacatgttagttaatcttttggagccgtaggtttggcttctgtatattgggaattatctctcttacagagttattggcagaaatgaataaggtaataaatgataaatagtgggtacttattaaatgtgggacctttttccttatgtttgggcttaatattgttgttttaaagatctgtgagttgatgtttataaatgttaactcactgatgtttttaaaatgaaaattacaaaaatgtaaaatttcttactttgtgcaaaagagcagggtcctgaaaagttgctttaggtccagttttgcacacttaaaacggagtatctttaaaccacttggctcccaagccaccaagaagctttttttacctatgtttttatagaaatttcaaacatgccccaaagtacagagaaataaatagtgaataagttctcttgcaccggcaacttattttgaatatttttttctttctattcttgttttctctgtttgctccaacttttctttttttgcttcattttttgtgttgttttttctttttgttttgttttgcttttttgagacagggtctcactccgtcacccagacaggagtgcagtggtgcaatcatagctcactgcagcctcaaactcctgggctcaagtgatcctcccaccttggcctccccaaatgttgggattacaggtgtgagccacacaccaagcctgttttcttgttggactatgtaaatgtaaatcccagtcaccttaacatttcacctataaatattttaatatctgtctttaaaagacacagattaaaaaaccaccacataaccacaatcccatcctcacacctgataatattaacaataacttcttaatgttgtctaagttccatgtctcttccttcccccccaaatattttttatagttagtttgtttcaataacaataaaaacaaagtcttcacattgttgaaaaatctcttgcatctcttttaatatgtaacagtttagttggggagttttttagttttttttttttttttaagaattcctgaggctgggtgcggtggctcatgtctataatcctagcactatgggaggccaaggccggcggatcacgaggtcaggagttcgagaccagcctggccaacacagggagaccccgtctctactaaaaataggaaacattagctgggcgtggtggcgggcgcctgtaatcccagctactagggaggctgaggcagaagaatcgtgtgaacctgggaggcagagtttgcagtgagccgagatcccaccattgcactccagcctgggcgacagtgcgagactccatctgacaaaaaaaaaaaaaaaaaaaaaagaattcctgagtctcacctgtaacctgctgaatcagaatcatcaggggtgtagtctgatggcagacattttataaatgttctagtggggattctgatagacaaacagccttgagaacctcagtacaaaggagtaaatttaagatacctttaaaatgagtgttttagtaaagtagtcaaccttttgaaatataattaccatctagttccctagtttatttatcttgtgaatgtaaacattttatttattggatttctctgaagcgggactaacttcttctttgggtgatgactgagatgatttatggcttctttctctgattgcttcttttgttcctggtgatcatttctcgttataggtgtttttctgctttctcttgagtactctctacttaaatccctcaatgtgtttgcatcatatttgtagttatcgatcttttcattgcaatttttttattacataggataattgctacagaaaactgggaagaggttaagcagtaagaagaaaataaaaattacctataatgtctctagttggaggtaataacttggtattttcactgtatttaattctagtttttttcttgtggcaataaacctttaaaaaaaaagtttaaaatccgactacaagaattttggtaatgtttaaaacatagtatattgtaaaatgttttaaattatgaaacattctttactacgagtttaatgattgcctagtatcccagcatatggatatggcctaattttggatatttgacttgcttaaatttttcccctggaatggaaatccttatttgaatccttatagattcttatagattcttttggcatatctatgactattttattggtataaattttttatgtttctgggttaaaatacttatatattttaaaagcttttaattttgcctaatttaccctcagaaaggttatatcagtttacactcccctgatagggtgagagtatttgcttctctgattccttgtctatattcgctactttttctattataaaccatttgtatatcttttcctctttcatattagtggcttttaacagatgacctgattatatgctttccaggcacatcacacctaaggatccagtatttggcccttttgactcttgagtgtttggaaaacaccttttggaggtctgggaagccacctgtagtcagttcaaagcttttggctctcattccagagattaaggatgtgtagaaccatgtggctggctattgagatttttcatgtagtcggttacttttacatactgcattgccacagagatcatgaaatgccctggttctggaagtggctgcatttcattggtaggctttaaaataaatccaaaacaaataaactttctcaattgtctttgggatccttggaatccacgtttgcaaaaaaaatattttacaattggttgttttattttcatttctattgcctttcgttctcttcccacatttatactgatgctttaaataggcatgatttctcgttcctcccatgcaaactcttaatgccactctgataacattggaaactttaggcccatttgatacaaacccttagatgtacttctgatttcttatctggcttttctggctgcctcagtcctgtctcttgtatcagatgagagttctatgggctctcgttagagggcaactgaaagagaaataacatggagaagaaaaggagaaagctgaggtatgggtggagaaagggagagctggggtatttgaatattctgaaaaactggagaatccatggtttagagtaggtgacattccttaaacgatactcattagagtgacatgagcaagggcagggaagacagggttcctgccaaactttgacctggtccaggtcaggccaaccttagagactgacttgccagattgaatggctgctccttctgtgttgaaggcaagttgggttgggcatccttattttgtgctgccgttgtcctgcagcacagcaatcataccataattctctgcatatatgactgtttatgtagcacaacaggaagagccaatctggtggtattctaaatatttatttcattgtagatgtccagcaggataattcagacgccctaagtccactttagacactcgcatttgtagaatgaatgttgccaaatttcagtttacttttgtgctgatcagacacacttcatatagtgctttaaaagacctcgaagtgtttttatggaacagacagacacgggaagtttggttctaaagggctaagacaaaaatattattgctccattggtaaatgtatttacccaaatctgttatttcagacaatagcccaacttagcactggcattaaatggaataaatctgttcttttactgatacggtgtctaatttagaaactttgctgtttttggcaatcacactgccttgatttaggtgggacagggatcagggattaaaatggctcttcccaagaggaaagtagacaagtttgacagcactgaaaacccaagacattgctgcatccggaaaatttatggttaagactggagaagtctggaaagttggacggctctgtcatttattaatttattggcctatgtaagatgtttttattttagaagactgatctacgacctctgaaaggatatgttttcaaactctgtattttttttctacgtgtaaaataaagatattctacatacaattttctaaaagaaaaaaaaagtaaaacaaagtgggaaaaaaggtccatgatattgcatccagatctgtgaaaaacttttcctttttctctattcacgttttgtgtattctgaaggtttgatgccagaatttcatcattaccctggagactgactgcaggcaacttacaacatttttttttttttttgaatcttgtgttgcgtttttctgaaaaccctcctagtaccttgctcaatttgtataattacataccgcaccccctcccccccacccgccggccccgccacacacacacatgagtggcaaaaaagccacagtgcatagatcccagggacttcagctgtgggttccctttgtgttcctaactcagctgggcttatagtacattttaagtcttggtgactcatagtctgtttgttgtgttgcctcatttaaattgtggcatcataaatcatttcattttttaatcatttgagtagcaaacaccccaaagcattgaagttaacaatgttaatggaggtttactttggatcccattgttttaatatgacaaatggccatgcatcaagctgcgtagcacagtttatttatgcagacataattagccctttgaaatgaaatatacagtgagccatttgccagaaattcaaagtctgctcaacatggcccatcctccaatcttactcctcctatgtgcttgataggttcaaggcagaatgtaagcaaggatactcttggctgggggaaattggaattaggattaaggaagaagttaccttgtattcagaatggaacactttcttctccatttctttgactttttgggggacttccaataggagagacttgaaaagttggaaaagaaattatttttggttctaaatatctgaagaaggggtagttccccaaaagagtctcattgaagacagggagtttcatgcactggaagacactgtcctctaacatgcaggttctggggagaaactgtagaatattctttctcagagatcttggagaacaacatatgtaagctaattttcaggatcttatcaaaactttatagggtctttttccctgtatgtgtttactttgttgtgcttatatgtgtgtgtgggtgggttggggggaggggagcaggaatagaagatgtagtagttcattcatggatgaacagttactgctttaagaactcaattacttacattttaatagctagtgcatagggaccacgttggcataacagacaagttctgggaatgatgagtcatccctcacaaattcatttcagcttcccacttttgtacatgcataagtaggcccaatcttcctcattaatctgaggggtagtatcaatgagggcagaaagaggggacagaggctgcctccagggttccataagttatgtcacagtgatggcaatcactatatctcttttgcttagcatgaaatgtcaaaggaggtgagtgaccgcttaaaagtctgggctctgatgcaccaagtgtttttttttttttctgttgaaattaatatagcatctccttaataacagagggccaggactccagcagtgagcagtggatcagtactatttgggatgagtcttttctctgggctcagctaattagttatggaattggcctcatgccagccaccaccatacatacctgggttctgacatgctctcagaaccagcctggtgctttttaagatgccagtagattcttggattccatgttgaccaaattttgtctgtttaagcaagatatatctgctggacaagagatgacacatatttctacattttcttagaatgtaggaaataggatttaattttagggaggctattcctagccaataacaagaatttccagaagttttacacctgtttctaccttcgtttccaagaaaagccttctagctattcacctaatcctagccccccaggagttactatcataatctctgtctatatagttattaataaaccttttatgttttataacgtgacacaaagtagtcttcttttggggtgaggactgttcaatgaatgttgattgttgttgccctggtgcaaatgacctaccagtaaatttccaggaaaaccctggctcccagaacttagactgaccctaccccactcccaacacttaacttttttttttttttgagatggagtctttctctgttgcccaggctggagtgcagtggtgtgatctttgctctctgcaacctccacctcttaggttcaagtgattctcctgcctcagcctccagagcagctgggattacaggcacacaccaccatgcctggctaattcttgtatgtttagtagagacaggttttcaacatgttggccaggctggtgtcgaactcttgacctcaggtgatccacccaccatggcctcccaaagtgctgggattacaggcatgagccaccgtgcctggccccaacacttactttgttttactcctatttactggaagcattgggaaaatataacagttggggaggaaggaaaacacaacaagaggttgggaagttctcatttctaatctctggaactgtaaattcagtctctgtgtgtagcatcgttgagagaagtaagtggagaattgactacttttttggggttgaaaaaatttaagcattgttagttgtgagacttaatcccattcaagttttattaacttttaaatctatgcctggaacatctatggatgaaataaagcaaaggcttttgatccgaaaacagtgcttttagagaaatgctattctaagggatttcttctttctttcttttctttctctttctttctttctctttctttctttctttctttccttctttcctttctttcctttctttcctttctttctttctttctttcttattgtactttaagttctagggtacatgtgcataacgtgcaggtttcatacataggtatacatgtgccatgttggtttgctggacccatcaactcatcatttacattgggtatttctcctaatgctatccttcccccagcccccgaccccctgacagaccctggtgtgtgatgttccccaccccgtgttcaagtgttctcattgttcaattcccacctatgagtgagaacatgcggtgtttggttttccgtcctcgtgatagtttgctgagaatgatggttcccagcttcatccatgtccctgcaaaggacatgaactcatcctttttaatggctgcacagtattccatggtgtatatgtgccacattttcttaatccagtctatcattgttggacatttgggttggttccaagtctttgctaatgtgaatagtgccacagtaaacatacgtgtgcatgtgtctttatagtagcatgatttataatcctttgggtatatacccagtaatgggatggctgggtcaaatggtatttctagttccagatccttgaggaatcgcctcactgtcttccacaatggttgaactaatttacactcccaccaacagtgtaaaagcgttcctatttctccacatcctctccagcacctgttgtttcctgactttttaatgatcaccattgtaactggcgtgagatggtatctcattatggttttgatttgcatttctctgatgaccagtgatgatgaggattttttcatgtgtcgtttggctgcataaatgtcttcttttgagaagtgtctgttcatatcctttgcccacttgttgatgggattgtttgtttttttcttgtaaatttgtttgagttctttgtagtttctggatattagccctttgtcagataagtagattgcaaaaattttctcccattctgtaggttacctgttcattctgttagtttcttttgctgtgcagaagctctttagtttaattagatcccatttgtctattttggcttttgttgccattgcttttggtgttttagtcatgaagtccttgcccatgcctatgtcctgaatggtattggctaggttttcttgtagggttatggttttaggtctaacatgtaagtctttaatccatcttgaattaatttttgtataaggtgtaaggaagggatccagtttcagctttctacatatagctagccagttttcccagcaccatttattaaatagggaatcgtttccccatttcttatttttgtcaggtttgtcaaagatcagatggttgtagatgtgtagtgttatttctgagggctctgttctgttccattggtctatgtctctgttttggtaccagtaccatgctgatttggttactgttgccttgtagtatagtttgaagtcaggtagcatgatgcctccagctttgttcttttggcttaggattgtcttggcaatgcgggctcttttttgcttccatatgaactttaaagtagttttctaattttgtgaagaaagtcattggtagcctgatggggatagcattgaatctatatattaccttgggcagtatggccattttcacaatattgattcttcctatccatgagcatggaatgttcttccatttgttagcgtcctcttgtattttgttgagcagtgatttgtagttcttctttacatcctctgagggatttcttatagagcagggtaagaagaaaagggaggagtgatattttaccgtgaaaccatataaaacataccaaattcaggacttggtatatcattatcatcaactataattatcattaacaaataacatcttcaaattctaagtatggcaaaaatctcctggggtatttattaaacctgtaggtctatcctaaattcactgaatttaggtgtgtgagaaacaccttgcgttgtaaacaagcacaaaatttgaggacattaaataaaggtacactgcttatcatatcatcatgtgtctataaatatttcctttcctttatttcattaaaaaatatctggagtattaagatgtgttccacttaggatctaagacagggagaatcagaaaattcaatatttcaaacctaagcaattcctgtttataaaaatagcatctgcactgattggcagcttgcctgcctgcctgtccaccttccttcctccttccctcccttccccttcccctttactttcccttcccatttccctttccttttccctttcccttcccttcccttccctgtcctttccttcccttctctttcctttccttcccttcctttcctttctattccctcccctcccctcccctcccctcctctccccttccctcccctctccttcctctccccttccctcccctcccctcccctcccctccccttcccttcccttcccttcctctccccttcccttttcccttcccttcctctcccctccccttcccttcctctccccttcccttccctccctttcctttcctctccccttcccttccctcccctcccgtccccttcccttccttctctccctccctccttccctttttctctccctcctttttttcttccctcctccttttttctctctttatctctttctcaacagcagttagccctgaaaggttatcttaaagaattaagaaattttcaagcatgaggaataactattttcttaatatatttagcagtacacatatgttttttggttagaatcaggcacacagaatctttttgtagtgactttatttaaattctgtcatttatttagttttttttttttcttttgagacagagtttctttcttgtttctcaggctggagtgcaatggtgcaatcttggctcactgcaacctccgcctcctgggttcaaatgattcttctgcctcagcctcctcagtagctaagattacaggcatgcatcaccatgcccggctaattgttttgtatttttaatagagacagggtttctccatgtttgtcaggctggtctcgaactcctgacctcaggtgatccgcctgcctcggcctcccaaagtgctgggattacaggcgtgagccaccacgtccagcctaggaatatttttaaaatgataaagcccatgtgttccattaaagtgtttatggcattaagtgattaaaaattgcttttgagccaaatgatagccaataaacagttactagttctctcaagagatggtctgggaattcagtgccactgcaatcctgcttacatttctttattcttaatagcacacagtattgtctgctacttttttcattatattaaaaattatggtgatgcacgtgttctcactcatatgtgggagctaaaaaattgatctaatggaagcagtgaataagatggtggttactagaagctaggaaggctagtagggaggggagataaggagggtttggtaaatgggcacaaaaatactgttaggaggaataagatctagtggtcactagcacaatagggcagccatagttaatgagaatttattgtgtatttcaaaatagccagaagagtaggtttggaatgtttcccacacaaagaaataataaatatttgaggtgatggctagctcagttacccatgtttgattactatatgttgtatgcttacatcaaaatttcacatatattctataaatatgtaccagtattatataaaaaaagaaaagttaaagaaattattattaatgttgacagcatttaccgtatgcctggcattgttctgtgcactttgcacatactatccaccttaatccttgaatcttccttttgagggtggtgtaattatttccatttactatgtcagaaactgaagcctcgagtggctgtgtctatcacaacaccatgatgcatcggagtcataaattttaatatctatctttctcagcagattggataaaagtaacttgaggccaaaggtcatgtctgactcaaatgtatattctcaagttttgattcatattttctgaatgaacaatgatgataagagttacttattgatattgaatgcttattatatgtctggtacagtgccaaatgttttgtttctaggactacctagggttgcatatcagctctgttccttactagaagtgagttcttgggttagttgtttagcctttctgtaccctgggtgcctcaaagacaaaatggaaatagtaatagtatctgttccataaagcagtttgagaatgacgtcagttaacatataaagcacttagaacagtgcctggcacagagcaggcagcttgtgcatattaactatcattattatttccaacctagacatatccccttctgacgtatgtgcccttttcataacagctatcctactttatgtcatacttaaaaatttttatgtagagagttccaaacttcctttgtctattacttgagccaaacttctatattgtagtattttcagtgctaagaatcccatgcattaccacgtggggtgtataaatgtagagaaacatcttaggcctttcaaaattagaattattcctagttgtaattaaattaaagttatcaattttcacataagtaggataaacaaattcctctgttgaagtaacagcaagttatgtgggtggttgtgtgtgtgtgtgtgtttcctctttctaacttatcaaagagaagttttgaaatcttggattttctataagcgctttctaatgggtttccttgtttagtttttcacaagagcaggtatatcatccccatatctctggtgaagcactctccaagtgtgttgacatttcaggaagtcttgaatgttgctaaatgcatctgtgttttctgctgagtggttggcccagactcaaaaaagtgtgcctacacaagataatttccaagtatgatttctaacatcatagaattgtagttgtgcacacatatgtgtatatgcaggtcaatatcgcttagaagcaccttccttttttattaacatcattgttttggaagtttttagttcatttaaattaaaaattattgttttaattatttaaaaaattatgtcccagatatattagctttttgatgttttttcctattttgccaggatgtagaaattatatctttacagttgttgaaatttgattaactcttacatgttatctttaacaaatattatcatgaagactattctctgacaaaaagtatattttgtccatttaattctcctagcttgcaaaatgtacagtattctaatagttatctccctagtaaaggctatgtcaggagagagggcaccttgatattgataacacattttgttttggaaagaagatataaagtcagtgacatacagtgtgagaggcctgtgaatatgaaagtaaaaaggaaataattacttgattgcagacatactgttagttatctctgtcataatctccttttccatttaaaagaaagtattcttactattataggtaatgcattttgccaagcaaaggggatagaagcaggaatcttatataaatccttcctatgcaaacacgtatgtttttcctacaactgaaagaaataactacctttgatagtactagtaatcttttccttttggaattgagttagtgaaagcttccatcataggaaggaagaaaacttctagtagcttattacacattcctgaaaaaaaagacaaaagagcaaaacacaacctaaatatccttttttattaaaagtcagaattagcattgcaaatacaatccagaacttcagagctgtcacttagcatgaaccttttgataaattggatcctgatatttacaaaatctattaaaatacaaccaatagtgtgtttgtttatatgttgacaagatgatatacaccctgaaggtcaagggtgatgtgaactgttatggtgttcttgtcaaagtagctgaaaaaagtggggtggtggctatttaaagagttttgatggaataatggctttaccacaagtgtgacagcaaatgcaaggatcatcttgaaaaagttcagttgatttgaaacaaaaatctgtgatgtttatcaatcaaaaaaaaaaaaaggaaagtctcttcttccttctgtagcatgttagaaagttggcagctcaaatggaaaaacaaatagtgaagttaaacagaaagaaaagcattgatttaacttcttgggtggtttatcaaatgccacacgaacttttcattctgtcttgtcatttattaattaccctcttttaatcaagccagttaaagatcagtttacaaacttttgggttacttctgtgtaaatagttccaacaactcaaagtcactttgtccttttactaaataatcttctctaattgttagccaagttgtacttctttttctctcataaaaactcgaaatttatctgaaaaataaatgtgggatttaaataatgcttttcccagcatgattttattactacatttgagttccttgttctctttttcttaacaatggtaacggccttagttattagagatgttagctcaaaaatgtaacaccgaaaagaatgtgaatgcattaaaggtctgttaagtttttcagtatagatctttattttagtgtttcaaactagcatctagaaaaaaactgagtaaaaactgtatatgttaatttcaaagtaataagtttattttaatgaaaggaattggtacagtatgttaaccaaatatgaattgatataagaagatagatttggatgttagatccccccatctatttagaaaacatttaaattgttatgtattttaaattatagcacacacagaaagctaattttatgggcattttttaatttaatcttaaaaggaactgagctttttaatgtgtctgtcataaaatggtttaattaaatgaaattaagccagaataactgtaaacagacataaaaattattaacctcatatctctaccaatcattttcaatataggatttctgctaaacagtgtgtggtttagctcccaggaattaattctttgagtacatttaaataaattggatcatctcaagttactgctccgaaggcagagatctgcaatagaatgttacctaagacatcagtgttttaagaagctaatcacatcgcaatgcagggacatttaacctgcagtggttgacacattcagcctccacaggcaataaggacaaccagatcttatcaaaacaatgcattaaaaagagcaaaagtattcttaaaaaaaaaacccaagtcactgatccctgtactccttaaataattaaaaacttttgctgaaagcaaattatctctgtggttttcttgacttacaggttcatgatcacctcagaattagcaattattagatggtttacataggccggaaactgtggtgaggtaaacatatatcaaagtattatgaaaacaattaagtgctacacaagtgggaagtgttatcatattaacatgaatgaagctacctttgcctgtgtgcatttaaaacattttatttattctatcagatgaaggtttagaaaccagcaactcagacacaagtagtggaaaatctttaaggcaacattaagacttctgaagttcaccatgctgaaaaagctgaggttgttgcccaaaacaaaaataaaacagaacagaaagacatcattaactgtaagagtgaatgcagacatttctccactcaggtggcttgtgcatgtccaagggctgagctcagctttgtattaaagacctgtggatttaataaaactttagggtgaaccaatttatggttgctatagatgggaagttagtaacacaacattacaacaaccaccctccctccaccccctgcaactccctagcctagagccctctaagccattaaactattactaaagctgattaatcaaccctgactgcttctaaataaaacaaatgatttaagaattaaagtttctgtatcctattatcaaactcattaagtcatctcaaactgctgaattttggatgaatttctaaattcctaagaatgtattcatacacatttattctcccctccccatatttatccatgatacacaaatattaaaataatcagaccaatccgcttggacagtggagatcaacataatcactttaaagttttgttagattgttttgttaactgtcatactgccttgggatattttaaaataattttttattactttttcactcgcactaaagtaaaggaaattaaagtatgaaaattttatttgcagacggtctaagatcttacggtagaaatgaaactttcttgttgggccaactctcactgttctgctagacgtgcatgggttttgcagaggcctctttgaagtgagagtgaccagatttcttgtgagtttcagggaagatttcaattacaaggttatatttcaaccccatccctctctgaagtcagacctttatctccttttggaaatcattccatttacgagttttaagactatgatcatatgactacaatttgaatatattctttggcatgttacatggtgacccaccacttctattttatttctgtcctggtcgttttaatgtgtttatagggttcatgttggccgagaactgctgtgagatatgggacgttattcaccgaacagagcagactgttttgcaaagtagacacccgagaggctaaagtgtttttcactgttattattttcttttattttgtagaaagaatgaaaatataaaaagaaaaaataacttaattagaaactaagtagccagtacatctaagagattacacatatattttagcacatttgactctattttggagccttttgaccaaatttttcttctgaattttaattctcttatttgagaataaggggctggagatgttatttgaattgcttttttaatttgccgatggtggtagaaaaaggtttaatagaggtgattttatgtgtgctgaatttaggcaaaagactgcatgtttcagtgtatttcctctccatttctttctcattttccgtctttactttccatattactttcagcgttctctctctgtctcacccactgctctcctcacttcccagagtctggctggcaatgtgcatgggaaccttagcagctgaggggcatcccaagtttgcattgtggtttggtggcaacaacccacactctgcaaccaagctcttggggctttaattcccagctacatctctttctaactgtataatcttgtgcaagacacttcttctcttcatgcctcagtttcctatatgtgaaataggttaatggatggttgtgaggatgaagtgagataatatatggtgcatccttcagactgtccctgacatgaggtaagcagcagatatgtgtttgctgtcatttcacaatatacccatttctaagttacttgcacatatgtgtggacagtgggatgtggaagagtaaactggaacatgaaattgggagttgagaattccaagacctgaatctgattctgctgtgagtcagtgtgcaaggtgactgcaaatcactattggtgtcttgggatcatcaaattttaggatttaaaaattttcatattaccctggcattttacttatggatgagcaagtcaggaagtccttagagcttaaaattactcaccctctagcacacattgctagggcagagccggccttggaagccagtgcagtgtcttgcttcttaagccagtgtttcccaaagtgtggtaagttgttgtatttaaaaccatccttctgagcaaactaacacaagaacagaaaaccaacactgcatgttctcactcgtaagtgggagttgaacaatgagaacacatggacacagggaggggaacatcacacacccgggcctgtcagggggtggggggctaagggaaggatagcattaggagaaatacctgatgtagatgatgggttgatgggtgcagcaaacccgcatggcatgtgtatacctatgtaacagacctgcacgttctgcatatgtatctcagaatttaaagtataataaaaatagaaaaaaataattttaggtgatacacagaaaagtgttcttaatatacctggcacatcaaacccacagttttacaaataatattgcttatgatgaggctaagtacgaggaacaaactgatttcaagtcattttaagaatattaagtatgtgatggtatgggtggtataaagatacagcaaaaaccacgaatgctgatgctgaagtatgggaaatcctgcctactctgggttcacccccgcacctttcaaatactgatataggccaggattatgtgacagcccacatggttttccatgatgtaagaatttttctgtttcactcatgatttcttgcccaaagaaaagaaacttaggcctggggagttttccctgttctaacgactttaaaaaacaagcacatgagtgaatattggtaaataatatgacttatgataccaaaacataggaatccatgttctggaatcctaaatgcaaaaggaagcagtagttgttggcaattgtaccaagctaagagaagtgtgaaacatactttagagggaaaagacagatatgaaaaccaaaatgtcaggaatggttctgatagcaggttatctaatcacatgcatatgagcatttactcatttgctttcagcagagattattaagcacctatataatctctgctctttatcagtgtgtacacaaaggtaaaacctatttcacacagcaactatatttttgaaacattataatttgaatttgctttattcaagtcatactttagggatttgggaaagttgaatgttttcaggaaaactagtaaagttttttgtcaaacaaaattattcctttatctctttggtaaatttggatttttatatatcacatctgtaaaaagcaaagcaaacataatcatagaattttcaatatttggacacattagatgccaagtgtttggttttgtttcagttgtttgctgtttctttttgaaggcatagaaagaagctattggaaatgtcacctggtctaaggagagaagcagcagggcccttccttagccttgttaagcaccatgtttcctgcgccttccgtttaaagtacatgatatggttttgctctgtgtcctcgcccaaatctcatcttgaactgtaatcctcacgtgtcgagggagtgagatgattgaatcatgggggtggttcccccatgctgttctcctgatagtgagttctcatgagatctaatggttttataagcgtctggcatttcccctgctggcacttttctctcctgcctccttgtgaaaaaagtacttgcttcccctttgccttctgccatgattctaagtttcctgaggcttctcctaccatgcggaactgtgagtcaatcaaacctctttcctttataaattacccagtcttttgtatttctttatagcagcgtgaaaacagactaatatagtacactagttcagtttttaaatgaatgaaaattctaatattaaattagcagttctttgacaagaaaaagaatttattatttcttaaagtagaggtctaaactggctgaagtgagctttaaagtatactatagaatctcttggtggattccgtattaggcatatgttcttgtttaggtagtctgtgaaatgatcttctcatggaaacattcagaagagatgcacctaatagtttatggatgatattcagtgaaaattagattttgtatctgtttttttgggagttgtgtgtgtgtgtgtattttagcatatggatggtgtggtccatagattctttgttgttcttgaaagggtctttagagaatcattactggtatatgctgaaccagtcctcagggatgcaggtgtcactcactgtgtgtggcctgtgctggaccctggtgactttatttctatagggtcactgcatctactgttttgattcctttgacttatccaaccaatttttaaaatgtgaagatttggggaccttgggtttattacaggtacagaattgaattgaaagatatcagagattctggaatcaagatgtggttggagaggagcatgagggatggggtgggtgatgtgggagtacgacctggaaggaggaaggatgggtggtaaaaaggatgctgcaggaagggcttctgtttgatataaatgtttttatgatttgtttgtagaaaagatgctgacacacttgtaacccttatttcaaagggcagcaaatcttgcacttgatttttctgtgtaaatgaactgtgtaattggtaatagtttatatcaaaccattcaaaaattttctaagcactgttgcaagctcgtagacttcccaagtgatatcataataatatcataattaccgcggcttatgaaaaaaatgggttaagttctaagatgtagtaacatctttaatctgaaatatctgcgcttggccaaatcagctttcctgtattttctttcacaaaacatttggtcccaattgtagttttctttctttcagaaaaaaaaaaaaggtcagaaaaagttcaaaatgacatgatggaatatatatttgtttggaaaaatgatctggttattgccatggcagctatattaaatttttagggttatgtgatatagtttttatattaataccatctttgaaatttatttacatgatgtaacagctctgatggttacattacatctttgaaagcaaaaatgtacaaactagccaagatttatgcagcttctcagcagggcaaaattattcactttaaagggaaaaaaagatatttgttggattttaattataccatttagatgttgacatgtattaaatttattacaaaagaaatgcaaagatgacttacagaaaaacaaattcttacctaataaaaaatggcacatatcttgataggctatgaatttttgctttccgatgaaattgttacaaagtaaatgtctgaaaaacaggtttcatgaataagacagaatctttacattcagtctttcttctggtgcataggattgttttatgtgtttactcttgctgagacttaggcttgtaaatggcttactaataaacagaaggcaagttgttaattcttaaattttaattataggtattattatttttaaagttgtttacaggctattctttcatcaggcgtgtcccccttttaaattgaacctcagattctaagttaaaattttttttataaagtcaattattttttagagttaattctgataatttttacaagggtgattatagaaattaaatagagaaaagtataagccatgtgcaatttatcatgattatacttccttggttttataaacccagttttgagaaattatatcccaactcaacattattttataaaataaatatatcaaattctgattgttttgaggatatgggagtaatattatttcctccctttaaaatattattttaacttaaaaagaaatatgatgtgctgcaatgagatagatctgaaatgatttagaaattttgaagaaaattttcaagtttgaatttgcctgaattaacatattaaacattatttaatatcttggcatttatgtaattaattcattatataattaaagcaattgtataggaatttttcagaattttttatgatttgtgaaaggggatcactgagctacagaaaaaaaggtttttatttttctagaaattctcttttgtaattgtatgtcaggcactatttgcagcccttgatatgtcatatttcttttattttttgcttactctatagagttattattctcttcttatacacaagaatgagcttggagaaattaagtaacttatctgaagtcacccagctgagacttgattcctgctctgcccagttccacttaatacacaatacccaagggcccaaaattctgtcatttcttctgtatttagctatgcctagtttttcagaaatattgaagtagaaggaaatttgttttggaaagggaaattaaaacccaccaatagaaaataatgataatggtactgtttgagcacttagtgtgtgtcaggctcttcacatggacaatctcattttatcctcacagaaactctgtaatatgtcatcttacaaatgacttaagtgttttgctgaatctcagattcagaaccaggctgattcactccatgaccatgcctccttttcatttaaatctaaatgcacagcttaaacatttgcataactgaattcacttttaattatgtggacttttagaaaatacatctttttaacagtttattcttgactcaacggctcggaaggcataaattatgattaaatttgcctaggtctaataaaagattgcgacttaggttatcccacctccctcttactgggtattgaaatttttttatatacttgaaatggttgcattttgactcttatccttctgggttccaacagtcaagtacttatattaagacatatttacatagtcatcaattcatagggtcatggaaatgggctggagaatcccaaagatcatcttatttaaagcccatgcaatggagcacatggagattcaagttcagtgacttagtaggtcatacagttaatactgccagagtaagaagtagaacataggattcctcatctgtagctcatctagcaactaattaactagggaatatgagggggtaagccagaggaagattaacaatgcctaatttatacaaaatttacagctcacaaaggaaatgattctattgaatgagctaatttaatgtgattatatgttttctttttaaaaagtaggaaaaatggtggcatcataggatttgatcaaagctgacagggaatgctttggtgtcttaataaccattgactcactaaatccagcaatagacagtgctaaatgttcacaaagctgaaatattgagcagcccagtgtaatctggcccacacacatgatttctaacctaaaaatatctgtcttatgaaataaaccaaccaaaggattctatttcagtttgcttttctagcgatcctgaaaatgtggtcagggatttaggtaaaaccagtatatcacaacacaattgcaatcaaattcaaaatgaaagcacagtgaagaccaaaaaaaaaaaaaaaaaaaaaaaaacaaacaaaccaaagcaaaacaaaacaaaaaaaaactcaggatttctagctcaggaaaggaggaaatgagagtgagatcacgtacttcagagaccgaagaaacccatcaacctttgaagagaacctcctcgaaagtacattaaacatcccaaggactctaactcagtcacggatgttctcatttccatttctccagtcagtactatccttttatctgaaagtatgggatttggcagtagtttttaaagtgtgtgtgtgtgtgtgtgtgtgtgtgtgtatgtgggtgtgtgtatacacacctcctttgagaatctaataaaaactatgaaccttcttcccagaaggttactcatatgcacacacaccattttcttgtggtttcaaggtgtttgtagccctgcctgaagcttctctatagacccgacgtaagagatttcatccattatttcctttcagcccacagatgcttcctgtggaaagaagggaatcaatcccacgtcctgtctagaatttaggaagcctacaggttataacaatgtgtaactaggtgccttcttttctttggggtctgatgtgagccataacctctgcaaaacaaaggatcggcaaaccttgtgtcccagacattcaagttgacgggatctcttggttagatttcctgggaaccaaaccttacgacgcaaatgcccatccagaaacacagggcgtctctctgggagacagcatggtgtcccagtgctggctgcacacttgccagcctcccacccagctgtgtgaaaggagctttattagccagcccaaaccaggcttgtttggagtcctgggccacttccattttctgaggctcttgatatattgaaaaatgaaaaaaatgccaaaatagggttacaaaaacagtggtatactttaaatgtttacctttaacaacttaatgcttttaataccagaaacatagaactgtgctattcataagttaattacaggatttataaaaatgttaatttatggtttgctacaggcagtgtggtccagtcaggggatccaatttagagttgtgcaaagaaggcctccttctttcaatcctgtcagtctatctctgtgattgtatgcataacctcatctggaaatggcttcaaaggtctaaatttgaggctctttatgaaagtggagctgagtggccctgctagcaccccctggagaggacttgcagaaagctcttctgaggaggagctggggttgcccgtgtcaccagaatccctcgccttctcctttgagtctcaccctcctcagggagcctgtgctcctgtactaggacagcttcccctagagctctatgaggactaacacagccatctatgcaatgggaaggatcctgggaatggccagctgctctcccccatagtggatgacttcagcccttactacacattttcgaattcctttaaaaggtcattgcctcctttcaaacttcacttaaggataaagatcaaagtgcaaatattcttttcaagagtagctccttgacccaccttcacaactaggtataaattacagctaccaggatccttatgagaggagaactggggcctgaagagaagcactgaggcatgaatggggtggggggatggtttgaggagtcagtgaaagggaagactagggatggtagcagtagtcctcagcgtgggacagttttagggattggaatgggaggagaaccaacacttggagagagagaggtacatgctaggcctctccattgggtgaagtctttatcctgctgctttgtagcagcctcaactctgcagacacttttggacatttttaaaggaaatgttcattttaaccatttaggcaaggcatacttttgaaagcaacattgtatcccatagaattctcccagggcatactcaactctgccttagctgttttggctcactcacagagcagagagacatggcccggcccttaatgcttgggtacctggcaggcgtcgtatccttttatctatatccatctgactgtccatctcttcatccagctacccatccaagcagccatccatccaaacaaccaaccaactgacagacattcccaacacaaggcactatatgccaagcaccatgctaatgcctagggataccatggcaaacaagacagattttatccttgccctcattgaggttatatccttgcatgcttgtttaatgctgccttttaaatccagcattggtttaaatgattagctttgcctctctttaagtcctgaggtcctttttgcaaaattgtaatggattaccttttccacatgtaggaatcccattctagacaacaaatatccaaaggttggatgggaaaatctacagatttggtaccagataagatgtcttatgatttgttttacatgtctctcacctatggcactgtaaattacttgagggcagggagtgggtcttaggtttttaatgctctgcaccaagcacagtggctggcacacagtagctgcttactaaatttttgttgaaagaatgctgtctgggaagtcagaggtctaaattcaagactcatcgttactgtcatcaccctctatccttggtgcctcatctcttggatcttgatggggaggaaacctatggcaagtaaatgtctttgatgtaggccagtagtggctcttacatactccctttcttgagcaccctgagtctgaggggtggcttcatctcttgcatagttgtctgatccagggcaggacagtgtaaactgggaactgagtgcatgctcagcactgtcccaacgtgacataaggaaatgtcttctcaattatttaagatctaaaaatatgttttctgtccttgacagacggccacttttcccttaataaagcatgtctgacaatcacactttgttggtgtggttaggaaaagaatgtcgtagacttaggaaaacataataatttaaagagtgacacatttcagcaaagaaataaagctgttgcctgctctgaaaagaagtaaaaccataggaaaccattacttcattgggacaaacattctgtgtctttagaaagttctcactaaaaaaaagcgggtgagctctagggcatagtgtgtgtctgcgcatgtatagaagtagtctgtctattttttagagatgttccctttacaaacatttcccacttaatactttgtaagtatttaatacgattgctgtctaacatagcagtttgcacctaggctttggtccaagctgcttcttggaaatcatatttttcagtagctaccaggctgaggtgtagtcagtaactgaggtatagtcaggtttcagcaaggtctatttggtattgtacccactagactatataaaccaaaatttctgctacaataaagagttaaatagtactccataagacgtgttgcacgaggcatatggagatttcaagtgtgcatcgcagtgtgagcattaacttaaatgtgtcattttatagttctctagtgcagaactatttggtgtacgattgtatgtaacatgcaaatcccatcagttcacactactattatttgtaggattattttaacaaaataatagttccatttcctgtttggtataaaactaaggctttatttttaaaagtggaggaagatgttaatacaaatttctctgtggtttattttccaaaattgatactttctcatatgtagcatgttgttgttgttgttgtttccaaaatccatctttcactgacacgacaagggatgctgagtagctcttcacatttgctagccacagtctgagattatttgcaaggcaggattctctgatgccaagggctgaggtctagtttactgatccccttccatctcagcaaaagtgtatatgagagagaagagagagaaaagccagaataggagggaagctggaaactgtggtgcttactcgttcatctcaggatatggatacaaacgtggtaataatgaaagctgccctttgtttacaatacacacagtttgtggcagcaatctttataagcccccaaatggcacttaataaataaaagaagatacaggttttcttgattagttagatataaatgtttactcaagctttcatgagagttttctttatttttacagagctctctctgctcaaatgaacgcgtgaacgaatgtctgtttttttaatgtgaactcactatatacaaaataagttttcgcaggatccaaattcatttcatttgtaaattatttaatagatgtcaagaattcttgttgactgctttaattaaagatagatttttaaagactggatttaagcaatttttaaatgggtagattgtgtcaaagaattttgcagtctgtgaaatacattaacactgatactaaaaagagagagagagagagagagagagagagaaaacgaacaagaaactgctccatgcaaatatttccaaggttgttcttagcaatgtagggttaccatttttttcctttttagtgttgatgttgtgtggacactggagacagttgtgcactgtggatattattgctgcaacggagaagagggaaaaagataggtttgtagcagggcctgtggatggcaccaagccagtgccgtgaaaaatggcaaacatgtcacagctaacagctggatgcagaaatatttctctttaatttggatggataaaatttttttcacagcagggcactctcaaaagagtacaacatcaaagagggcgggtctcaccagtcagacatcagctggctccaggatggagcaaaatgaatgaactgtcaggacttttccagcatatatgcttttgccaagtgaaaagttaaaggttcagtggcttgttcagatcacagacagaatcctgataatggaagcctgattccccaaagtcttcctctgatcaacagacagagcatgcctgaagaagactccagaatgatggatggcaggcttcatatcgacggctgccgccgccttcagagataagtggaattcaccaaatgctcaacagttctcaggagtgcctgagtccccatgtcataatcctcagagtcaccgactctcctctgctaacttgacacttagcagtagctgacccacagtgtgaccaaaatacccatttccatttcttcacatggccggctctctgatgaaggctttgcaaacaacaccacaggtgttttacagttcattgacacttttcaactgtttttctgattaccatatttcagtcttgacttatatgttagtattatctgcacactcaacataaacctctaatgattttctaatatttctggaacttgatgaatgtgaattgacaaagtacagtatatagctttatatcagcattactgaaaatacagcaatggtgtatataaccattactcacttattttatggggtatttattacttgacctttgaagccacattttagaatcttggcattcgagacattccaaaatattccagaccaaagtgaaaggaaaggatttccttattagaaacaacaacaaagtaagttaattgtaataggtggaggagggagaaactattaaaatgaaaaaatgtataatatatatttgagaaaaaataaaaagctgaacacacataatatgggcacactagtcggtgtttaatgaagaagctttattgtaaaatatgcatattcacggtcttatgcattgtctttttttttttaatgttgctggtcattatgacacattgcgataagcagaaatggggatttgtgtctttatccattgcatgattgctagttgtttacattttaataacattaattctcactaaattgacatttgttctaaaaatagaaatttgattgataaagaactttattaatcattatgaatgtttttatgaccctcatttggagaatttcagttagttttaaaggaagagctctacatttctctctgatagggcaaataggatgtgatgaaaaaagcaataacatggtggcctatgattcacatttcccaaccatataactgagagcaaatcatttcatctttctcagcccaaggcttattacctgtaaaacagaataatattctcagcttctcttgcaggtcagttatacagataaataagtctgtaaaagtattttataaactcaaatgccacacgaatatgtatgacttggtcattaactgatgttctttgcttgtgtgaaggtggaggcagatgctttcacttattttgaaagtttcattttgtgatctttcttctcaagccttgatttagctttatttgaaagtttaaaaccagaaaggttagtaggccacactgttgtggtatttgctgttttcctctctagactggggagcagtgctggatctctgtggatctgaggctccaggctgaaatccacaaatgtcccgggctttgcatccaggtacatgtgactgcacagacagctcacctaccttgaacatattgagtgttcatgcaggaatatggcactgtaagttggggctccctctggtcaaaaatgtcagtgacttcagagatcaagcaatcctatatggtaggtgatgttcagtgagagatattgggatattggggttctaaagccacagctaattaaaacatttgtacttgttaatttcaagcatgctccagaaatgttctcaaaggtatagtgggtgcctatgtcttttgcatgacaagcgacactgcaatgaactaaaaactgattaactttaggaaagtgtggagttgaagaaatgcttccttaccgttttctgaacagtatttacattcatataccatttcttattttgacatagtttgctttattttaaaaatagattcatctgggagataaaatataaactattaacacgtcaactgttttactcctgtattcccttgatgtcattccaaatctttttcttctttctcttttctttttcaacaaaagttgatttcctggtgtgtacaaaaccctgtgtaaggtacctatcagtaaattacaaaatgattaaaatgcactcctgccctcagtgagtttatgctctggtaaccttagaaatagtttatttgcatatgctgcgcataatatattgtggccagtgtccgtgagcaagttagtagattatgtctagactgacgtttctcatctaataatagtgttggtctaaggctggctatgttctttgagctcttactagatgtccagcattgttttcagtcctttacatatactcacttatttggtttttatatcagctctttgaggtagggattattattagcaccatttttttttctcagaaaaagaaagtctcagtttccttaagaggttaaataactgaccaaaatcacgtcatcacaattgtaactcacatgcattgaaactgacacccacatgcaagctcttaacctctgtactctacaccctatggtcgcccttaaccatagtggtttatatcgtgtgttttcactgagaatacttaagaaggtctcctttaacaaccaccgttcaccttttaaaaatcttttatttagcaataaaagaaatctggttactaatttttcatagtcaaaacagccaagaatcatttttttgagtaaatggttgtagagctgtcttatggactacaaaatactgggcctctacctcctgacacgcagaggaattgtgtagtaaaacatatttatctatgttggcaaacagtatgctttcttaaatttctaatacacttgactattggaaccccaattttctgaattttatagaaggatggggctgtgtaaaggcactgtgtaaataggtagaggatatctgagaaacggtgtctttttatctggtcttccctggatactccatgagctgtgaaaggattgtaaacagcgctgggttcacaggtctaaactggaaatctccaacgaccttttctgggccctttctgtggtaattgtttattccattttaaatcatcatatgaaattcacctttgtatttcatagagttgaaagagattggcttcaaaaagcatgtaatattttttaatcctagttgttaatacttagaatcaaggtttaattgcgtttagtggtaatttcttcttaagctttgagtaaaatccaagatctttaagaaaatacagaattattgtgagaattcaattacttcggcatgcattgggttccttctatgtgctgggccctgtattagatgtatgggcataaaatatgcttcctcacctcagctgcttggcgaaaactggaggctggcacttcaacacacaaccaaatgccagtatctggagccttggcacagggatatgccagggttgggagcatgggagagggcgtctgaaatgtctcctcactccctgaaaactggctaatcccttttatatgaaaccttcggatcccacttccccctccccatgctgaaatccagggaacccgttcggggaggagcagattcatgattaagttgtaattcaagttccttttgtctgaggtcattagctctcttcaggatatttacaggactgaatgaggtgaggaaggcctcagcacactcccagatggggaggcagagaagtggagagaaggtgagaaggcctggtgatgagttctggttctgtcatggactagtcgtctcactttgcttagactactaacttttgtagacgccatttccttctgtataaatggatggggttggaacagatggtctctgaggtcccttccaaatctgattttcctgggctctaaatttagccacagtgctcggcattctggcagaagagttggtgactgagtttttcatggaggccttatctactggaggaaatgtgctgcctgtgctttttcacacagggtcccccagctcaccttgggcccctagaggtgtcctgggaactgtctcagagagtcatagtggggttagttgtgctggtgaggtgctctcatcaacccctcattttttaaccagggcaaatttcatctgtttttatagtggaattacatttaagacgtccttgaattaaaggggatccttcacttaaaaagatctttgaaagcctgtgctggtaaaaatggagggaaattaaaaaaaaaaacagaaaaaaacaatactctgtactccccttcactggaaaactacaggacagaaagcttggatcttgggtcagatgatggcatctgggaagcacaggagtgatgaatgtttgcagtgtttctaggctgtcacttcaaacagttttctttgaaagtgcccccagctgtaatggactgattttcagtggtggcaggaattcccttacagctgggcttacaaatgtaaatgtctaatgaggccaagcaggtaagtaaattagtgaagtaagtagcatgtaagacagtagagaggtagagactgcagaactggaaaagctcaagcccagtctaaagggagccatcttttcttatcttaaggggatcactgccagagatcgaggacccatcttttgatttttcagaagttagaaatctcaactagataaaattaaaaaaatttttaaacattgttcaggaaaaacaaggttggtctattgcttgaatttagcctgagagccactagtttgcaaaggagaaacactttgctcagagccaccaatacacacaattcctatcatttggaagatggtattatgcttatgttaaaacgagcttagatcagtcactggcttacaccatttctatgattattgttgttatcataagctggcagccttggtaaatgacaaagcagtggacaagccactcacagacagttgttgtaacgtgcaaccctggtgcataatttactcctgctgctctcatttaaagctagattttgtgcaaggaaaataagagcatgggagagagtggcacttcctaatatccaggatcacaatacaactcctttcttgtggtagctttcggttaatgccatgcatgatttgtaatgagtgagaaattgtgtgatcattatttcaaccatatgtgtgatgtcccaataaatagaattagattcaatactgttaaaatccgcttaaacaggtaagaattaggtctccctttttcttatatttctactcctattgataaaagagaaagaacagaccaaaagcaatggtttgaaaatagcagcaacaacaatcacaaaagaaatcagaggctgatagtatagtgatatgtattacaaatattttcccaagaggataacagatagtttttaacattaggtaacatagcttctctgttttaacaatgcatgcaaaaactgaactacaaaaaaaaaaaaaaaaagggctaggttttcttttcatttatttttttctctgatgttttttgaaatcagttaagagactcttgctatactttaggtgagaaaaaacatcttatttgggctaaaatggttaacagtggagagaatgacataaatgcacttgaaaagtacgtagaagacaaattcaactggatttgatgatggctaggctctgggggctgagggagaaagcagtatcaaggttgaatgagtttgttcaactctgggtatgtagtcgtggggtttaagtaggtgcatgggatttgcgtcacagtttcatgtgaaatattataatgttagtattagctaaagccaggaaaaccaaacctcatgccatgtgctacattgtgtgatatttgggaaaagcctgacaaatagccttttacttttcctcaaggcaagtagcagtttatatcaggcaggcaaaaattgtagatttccttgtagtcacgatatacttagttaagattactgctgaaacaagagtgtagggggaaacacttttcatactaattttcaaggtggactggttagtggctggtgatcaaatgagccaacggttaagacagcccccactagttagacatgttagaggattttacttgctgttgaagatagtggcttcatgcacaaaggaggattgttgtgtgcacttctcaaaatgcttcataataattttcaccagcagtccctgtggaaggtttattcttgagggaagggagggtagggggctgggtcatcaacatttcttactccatcaaagattaacagtggcattaagggaaccaaatggctttggtcaatgttgcaattttgaagaaactggttaagattaaaaatttcaactctgaggctgtcaacaacagtttcagagttgaaattttgaatcttaactagtttttttagaaaaacaaaaacaaaaacaaaaccccacaacaacaaaaacagaaacaactacagtgtaatcaatcctaaatatgttgtctatcattagattgttcatgtagcagatgtagccaccccatgcaatgtttccattttttgccattatccaaaacctagaaatttaaagaagtcattagccttaaataaatataatccaagaatctcttcactctgctcaagctaaattgattatcagctgtgatcaccctggtgtgtttacccagtcataacttctcaattgtttttaacagattaatgtttgaatttcattgtggggttagtggaaaggttggggttggagaggaatgagttcaagaaaagcaaaaaataaaataaaataaaataaataaagtaaaaaaaaactcagctgtttttaaatgactagtaaaaagaaactgtcatcactaagcccgtttgcaccccctcccccggaatagaactgctgagctaaactaatatgaatgaccatactaattttggagcctaaatgtaaccagtgaggctctctctaacacttattttccatgcttatttgaaaaggaaaattggaagggcggactagcaagagtgagagacacgatttgtcaggatgctctggagaagtagctaccagcagaaggatcccactgctgattttatctgaaaaggtgcagtgtatgatggtccttctgagaaccatacccttaggaaattctttaactgtccctgcttcctggatggccccaggactgggagtgactttctagaattgctgtggatacatgaccgcctcatctcccactcctctagataccatgtctccctaagtgccctgaatctgaagtcgtttctggaaaggcaagctgttgcctctgctgttggcactgactctgtgtttgcttggctccctagttgctttcacaagactttttgtctcatgcttattgagtggtttgaagcagatttcattttctcaaatgctatcttgaaaggaaatctgcttgaattgatgtgaggcagtaacaattagacaactcggttaagaaatgtaggattcataggagacagccattttttttctttccttttttgagggtctctcttttttttttttttttttttttaatgactcctctcctactagtttcaggtcctgaaaactgaagccctacatcttctttgaggtgagagtccatttatttcacccaaatcagagtctgttttgccagttctttacggctccataactctccaactgccttctgctgggtgtcgcccagcctgttgaacagacagttactgcctcccgaatgcctctgggcagttgtgtgtttgagactggggggcctcgaatgtggatgttccaacaatgtcagtgcggcctctcctttcagcttgctttgtttatccagcagctcattatttaagactagcctgtcaaaataagttaaatattctttgggaaatatggtcacatccgtgagataccacaaatatgtttaatacagagaagattggcttgataagaaaaacatgatcgacttgcatcatcaaaacatattttcctgttattccggttgagttgtccacaagcatcaataagcactagcaaacctaagggcaataaatttctgcagctgacacataaagacaccaagggaagtagggaaaatgattgctgatgattcgttctaactacttgaccttctgacctcttctccagatatatgaccaggatgggacactacagcactttattgatggtggggaacctagtaagtcgagctggatgaggtatatccgatgtgcaaggcactgcggagaacagaatctaacagtagttcagtacaggtaaagtatatcttgatttaccacctacagagctgaagccatttggcttgcatatacaaattcaggcttgccactggtgggtaaaaaaaatcctgcagaactctgcaaggactggcagacattttttttttttgctaggtttctgaaacctccttagttcctatgacagtaagagcattcatgaacatttaggattaaaagtgctcgtagatggcctccttcactccgtgcacatggtgaagttactcccacatcattagaacttccagaatggtctgaatgagcccagcaaacccactgacttggggtgcttttcccaagcagtcgtcttcacacagataagtagaaggtcagagattcagcctcaggtctcttgctttcagtctccttcatgctgtctcctttgaggaatagctttatttgcacaacagcatgggaaaccaagaactcgctaccttcccaaggatacctttccaaaaccgttagacttagtggcagtgacagagccagggtaactctcctgctccgtctaaaggtggcagtgggtttggccctttgatgattcaggatttgtttcagttgatgaggcagtttccgggcatagagaagcccctggtttcctgaaaggtatgggcaaaacacagaggataacaaaggcagggtggagccatccccatttcccttagggggtccacatagggaggcctctggggagctgagaagcagggtggattccccggacactcagccagttcttctcagtgcacctgctggtgaagcatttccacttagtgctaaggaaggctggagtggagatgagagggcaaaaacaaatcaaataggaaaaaagccccaccactaagccttcttctctcaaaatccctcgaaaacgtgtgctatataaatatatgacctcagttataaacagccgtgttctctttagaatcagaagcaactgtttagctttattaggcaccacagacacatcaaagcagagggctctgtgctcagcaacttggagtcctgcctatggctatttattttcctttcctttttttttttttttaaacgaagcttaagttttttctttttaactttcttccccttgttggttaaaggctgcacaaatttggcttgctctctgaggtcttcaattaaaaaaaatgtgggcagtatgtgactcaccgccttggttttcagtgcagttttatttcattaaataacagtttaaatgaagtagcacaagacagtatttcattacactgctgtatgtgggctttattcacctttattacagctgcatttctgttgtgaggttttttataaaactctgagctagaaaattagtgaagattgtacttgtccacttagtaagagatagtttggttctgtaatgggtacccagggagctatagaggcaaattctgaatttgggaaaacaagaaccccctaagaggaaggtgggcacgggtaagtcattgcctatctgtcaatattaagtgggttttttacaactccccctttcatgacggcgcttacactatgagctctctctgccgatctgttttcgattacttcagatctttacaaaatgaaatacaaaagcccaattttaaaaactggcattcatcaccagtgaccacgtccaagagtaagaaaatagaaaagttggaccctgaagagccaggctaatttttattgtacatgaatgtcctcttcacaaaaagtcagctggtttaaattcattctgttatgatttgtaatatctaaatggaattttcttcaaagcacacttgattgattgacccttagctgaacgttttgtttttattttgaggctgacaataatgtttattggcatgtgttccacttcaactgcgttgggacgccatgaagctatctttatgagtcatccaaccacaatactaaatacatgtcagcaaaggaaatattatctgaaaagggaaaaatccctttgatgtgcttcaacatgcagagatttctgcgagttttggaagctctgcccacttgtaaggaatggtgtacgcttacacatttttttccgcctttcggcctattcggtgcctcagaagaccacccattgctcgaaaacagttctgctctttcagcagcaaagtgtgtcatttggttttagcacattcatttgctgggcgcagtgtttatattaagggaagccaaaccgagagatgaaatgttgcaagggtgaagtacaaagtagactcaatttttctcaagttagaagatgccagtgatttatagctcagctccaattttgatttttttatgtagcagtggaaagaattaataaaatgcagagctcttggagatgcagagggaggaagggtagcaagagctaggcaactggctggagtttttgtcagatattcatagaatgttgggaaaaacattctgcttagctagcagtgccctcatgagacagaatggcagcaagtaaggaaaataacaagataaatgaaatttttgcagctgcaagtacaatattgagaatctgcacttttttattgatctttatgatcctattgccaagagccactttgtggtgacaaaatatgttgacaagtgcatatctcactgccatgaaaaatgtggagaagcattcgccttatgtctgcagtgttatacaaggaacaaattgccctgctacagccaattccttacagaaaggagaaatttaaggcccaccaaccctacacacttttatcttgaacttgaggttcatatttgtaatagcagttcttcattgagaaaaccagtctcagtctcctcatttttttaatctgtaggttttttttttacagtaccaaagctattataaaaaatgttcatttttcagtaccttcactgtatcgtttcagagtgtaatctttcagccagagtaaagtgctcctcttgtatttattgaatttccatccatttcacatcagagggtttttctcttctcctgtatcaaactttagaagagcagtggagaagatttttatttccctgagtccttatatcacaaagctgcttaattttattacaaattttggaattcccaatgccaagttgcaataatacatttaatgcttttccttcaaataagaaatcaatagtatttatatatgaggttggggcaccagtgtctttgcaattttccaggagggaattttctcattagtgtgagatgaaatttttttaaaattaattcttcctttctgatgtctcctgggctaaatatctgtctcttcagccagttcattctagggagggtcattgtggaaataaattgaatgctgtttatcacactgagttacagactctaattggttgctggggacaatcagttggatgtaaatttattacaaacagaaactgtttagatggagctgcgtagaactttttcagggcaataaaaatatggatgggggcacatgagtcctatgtattactaagctgggttttcttttgttttgaataggtcgaatatattctaccgagcctgtatagatatccctaggggcaccgagcttctggtgtggtacaatgacagctatacgtctttctttgggatccccttacaatgcattgcccaggatgaaaactgtaagaatttattttagctctgaattcacatttcaatatacctatttcaaagctaactttttaagagctttttttgaaactcatgaaacgtggttcactgtaataagtaacacaaacatatacaagtctattccatcgttttcttttccctgcatgtcatctgctttctctagggcatcttaacctgtatgggccagtccttcacttatcaacaacttcaaagcctttgccagaattttaaataatagttgaagcaagttaagtcagctggtattcactgagtacctactatgtgtctggttctatgcttgccaccttagggattacaagagcagtgtaagattcaccttctgctctgaagggatgtacagtcctgtgggagccacactgtatgcaaaaatgaagtaataagaaagcaatgacatttaatcaggggtaacacccctttagttgattgggtgtgcttcctcctacatagtcatttgcatgagaaataatatttaaaatggtagatatgtgactgaggaatttgtgtctttctaaattttttgtctaaaaccatgtctggaaacatgtaattttctcctatctttattaccgtgccaaccattatctttaaaagaattaacatctaggcaaatgtgaacttgcagcaactttcatgtaaactttatatttctgctctatcagttatttgaaaagtattttaaagtgatttcgtatttggaacagaattaggttattctgatatgcttcagtgagaaacactggtttcagtgatattgtgttttcttgtcaccacattgactaatttgtgagctgatagtttgatgttatgctacaaaaagaaacaaagataacagatatcttttgataatggataagaaacttcattttgaaaaaagtgggtttttaaaattttcttctccactttctaacacatgcactcacacaaaaactgcaatttaaaaacgctcatattatgactgatcaaaatgctgatcgtcagatatttctttcccattttgtctttaatttctttgtaaaaagaaaaatcgtcaaaaagcctattactatcaactttccttttctattttaccctaaccccaaaaccaatctcaaatcaaaaaataaatctttgcacatacagtacattcctctgattttgcaagcttccactggaaagtttcttttctgcagccatattcctgtttgagggagttcctgttttcataggagaaaatctcagtgttggccatgagtatgcagtgagaggcaaatgtagacatagaagccactgtgctctgcctcaaacagaatgactccatgccccatgcccccaaaactagatctttatctatgcacagaaaggtgtcagcatcagccagcctccccatctactaacatgtacttgtctgtaggttggaaccttgatgtaaccatctagagtgtttgatccaaaaggattctagaaatctcacgagatcctctgtttcttcttttactacaacctgctacagactctgaagctgttgttgtggtgtgtgtgttgagggatgtctagagtaaacaacatatcaaggccaaacatttattcattcattgttcagatgtgtaaggaacacctaccatgagccagtgtctttgctgggtgatataaatacagcagtgaacaaaatggaaagaatccctgccctcatggagcttacattttaatggggggagacagattatcaacagatatataagtgaataaatagttggtcagatggtgataagtgttgtgggctaataaagcagaaaaggggtaaagaggtgccaggagttgggagttacagtttcagagagtgaacagggtaagcttcactgggaaggtggcctttgggcaaagacttaagatggtgaaggaacaagccatgtgttagtaggtagaagagcattcctggcagccagacagttataagtcccaagatgggaatgttcctggcatgttggaagagcatcacagaggtcagcatgggtgcggctgagtgagtgaggtgaagaggggttaacttagatgtgggtgcgtgctagggcagggaagaccttgtagggccctagaggccattgtcaggaccctggctctaactctgtgtgagctaggcaaagggagctgttgtagggttttgagaaaaagaactatttgactgaatttttttcaggaataatccctgagtggagactggacagtagactggacagggggaagagcagggaatccagctagaggctcttgcagaaatccaggggagagatgatggtggtttggactagtatggaagtggtggaggtggtgagaagtagttggattctggatatgttttaaaagtaaatccaacagcattttctgacacattagatgctgagtgagaaagaggagtcagggatgactttgaggcctttggcctgaggagctggaaggatggcatgaccacttactaagctctgagccagaaatggaaactgtggagtgaccacttaggaaatgcatttcttaccctcgatctggatctctggcgtgggagactcatatccacatggtgcttccacctgacaatgctgtcacacggacaggaggcattgaggggttggagtagagcatttttgggtctctgtgccattcacagccacctgaaaatgggtgtctaagagcataccactggccttcagatttggtgccaccgtgccaaaaatgtactttctggaaaaaacataccagtttgcttttcagttcttctttctgctagtgtctaacctgagtgaagcattcttgagattgatgattagagtattgaataaactctaccaggatatatgatatatcatttagcacctgaagtccttgaaagaaaatttgcaaagctacaacagcttgaagtattgtagactcagtaggaaaactaagtagttcttttgggttccgttcagagctctaagtaagggttgagggaagtttaaaaggaattaagccattgactaaagtgctcaacagtgacaatcccctttcccccaagggtattataggaattttatttcagttcctgtctcagagtcatatatctgtcatgtgattggccacccaagaaaccagcagaaggcttcatcagatcgtgtgggggagatatatgactttgactgcctctaagatggattctcattccatgtgattcactgggagacctggaaacacctaaatgaggattccttcttctgtgctaagaaaatactcttgtgatttgaaagcacaaatgtgtaaaagggcatgggcagataatttaacagatagccttccacagccctgagtaatttaaatcatctccactggattagcaattccaagacatttttatcccactgagctagccacaaaataaattaggtacctaaaaagaagcttgagatcaaagactttttcaataaaatacctccacagagcctctttatagggctctgcgcacagtgaacaatgaagaaatgtgcactgaataaatactgagaatttctattaccattattagaagggattaaatatttcaggcagattttttgttgttgttaatgaaattgatacctggaccaaggcattcaaggaaaatatgattttacttagtgagtaatattaagcactttcacttataaaaatataacttttttcccatggttctttcaacattgaaagtacacatttcctatcgagagtgtgcggtgggtttgggttcaggacgtgccccctccgctggcggccccaaagcagggcggccgtgggtacactcactgcccggacagctcattgaaagctgccttgactcagagaagacagcagttcacacaggcatttgggttctggaagcaattcccatgttattttcttttttaaaaagtcgtattataaatgtaatagagctccaaagagagtgcctttccatccactgtgggcctttcaaaagagcctgaaggaacgcctgtgtcgacagatcacatccgcaagaaggaatgaggttccccaaagcttccagtgggggattagctcctgcagagtgtaaagaccttagtgtattcatattcgtttcagaggaaattaaaaaaaatcctgggaataaatgttaaacaagtcttcctgctgctttttctgtctcagcatatgaagctgaggtggcagaatgtgaaccttgatggcaacaggggagttgctgcactggagtaaaccctgcctggaggagccctgcctttttcttttgattttaaagagcagaaaataaaaagtgggacctcttcacggtgcccctcacccccaccgttccaccaacagcgagaaactaggtcagagtcaggaaggccctactcaagcccttagtggtgacctttagaagataatgtatagttcagtccacaagaccatctgtgcagggccccaggggaagcgttgtgatgggtgcaaaaagccaggccctgtcctggaggagctcagtctacaagagaacacataagcacataaccacaatatcaaacactgtgcagatgctgtgtgaggtggccacagcagagagcttgagctcggggctgtcaggctgtctaagtcattcagctgggagaagtcaaggttccaggcctcttgtgtacagtgcaaagctggggttggcttagaaccaggaaccaaaagatactttcctgtccctgaatggggaatagaaaaatgctgccctcaagccagtaagctaaggaactgtccatcttggggcactggtgaaaacaaagtcacactctaaaacctagccctagtcgtaggatgttatgaggcttgattttgtactacttgccagctatggaaaccctgagccaagaaactaatataaaaattggtctagagctgttgaaacctgtaggttcctagaagaagaaagaagtcactccgcagggatgcttctgactcttctgcaagactccaacaagaaggcagcacccactaaaaaggtgttgacagagacaaatgacaaaggtctcagggaaagtcactgttatgagagatttgactttttgcgtgctgtaggatattgtggtgtgctgcctcaagcccagctttgctactggatggaggtgctcattccgactgtttgtgggagtgtagggggctgacatctcggatgagttgtttccaggaattacctttagcccacttgaaccacctcgcccttggtcatacttcctcccacagtagcccatgaccaatgactggtcaatgtggggtgtataaaggactgttcccttgcctcaaaccaggacaaccctaaaggacattcattccatccagctccagagctgttaaactcctccctcagctcagtgctgcttgcctcacttcccaacaggtgttgatcctgagagcaatccccaaaccccaaatccccatttcagaatctgtttcctgggcgacctaatttgagacaggtactcccagatttccattttcaatccagacctccttactgagcgccagactcctctccagctgtcttggcaacatcttcacttccatgtctcacatgcaactccaactaaacctgcgtaaaactaaaaccactctattcactcccactaactgcctctcccatctttcagcagctctcactcccaatcatccaattgctctgtcgagaaaccttgacacctcactcttgctcacccttctatccaatcagccaccaagtcctgttgattgcatattcttaatgcatttcttcatttctgctgccacctgactagtgtcaccatccactctggcttggacccctgcagtagccttctgcatgacttcacactttctttctttagttcatggtggccagagtgaagtttcaaccacttgcttattttattgtttcagtttattcacttgttttgttaataggtagctctgtcccatagatcaaaatgcagaaagtactgtggacataaaagtctagtctccttccaagatgccatcagtaatgttggcagattctcaggtattctttcagagataatttttgcctattcaagcatctaatcgtattcccccttttattctctggctgtcattctcccacatgtatatgtagcacactatatacactgttctgtactttgtttctttatttaccgatacagagtgatgatgcctttaaagcgtaaatctgatcatctcacacccaagcctaaaatctttttttggcttgccattactctttgctaaatccccagttccttaatatggtagcctatgggtcacatagagtctccagaaacattttctatggcccatatagcattttacaagattagattctaaacatctctagactggccgtgccctgttcagaatgtgaccgcccccaccatcctctgttgtgttaacctgcctcccgtcaccccgtcagatatttccgtggcctgtccatctcccacaggcattggcaattgtgctgccttcctctcaagcctcggctgcagcccatctcctcttctctctctggccacattgcctttttttccattcctttagtgccctgagctccttcctacttcagcatggcacaagactctatggcaaagctgccgatattccatctttttgcattgccttttcctccctttgcacttgtatgatgcccgtgtacccctcaggaacccagattctctgatttatcatttcctgatatcctttcttttctctaacagcacttaccacacttgtcttaactgtattttgtcaattctaaaatttatgtttttgttttttattttacattttaatctttctgaaactggcaagtgtcttgcaattaatggtgacttacgattataatggtgaaattaatggaatgttacatttgatgaaactgagtaaatatttatctgtaaaaacatcagcttaataactgtctttcccactagagtttatgtgccagagggcagtgactttggttttcctgatccccctatatccatggtgcctagcacagggtcaggcatgtaatagatgctcagcaactatttgtggactgaatgaatgaacgaggaaggggtaaactgaacttagttttatagatcctgaatttgcctctctcaatattttaactgtccaaatttcatgcgttcatgttcttccttgactgtatcctttaaggctttgagagtttgccctcttccccttaatttttgcgtttccagactgaagagattgactagctcaatattgcttcttgcagaaaccacttcatctttttggtcattttaataacccatctctgcaccttttgccgttgtctatgttgtctttcttgtgttgggatgaaatttcctgtcctttttctgaaaatttcttgtgtttagtttatacctttaatggacatagtcagtgaggctgatatttaggaagaataatcttgtgtgtctcctaaaagtgctgctttaaattttttttaggagatagagtcttactctgtcacccaggctggagtgtagtggcatgatcatatacaatagagcattgtaaactatcgtcaccctactgatctatcaaacactagatcttatttcttctaccaaactgtaaatttctacccattaatcaatctctcttcatccctactcccctgtcacccacacattcttttgttttaatataaaaggttatgtgaccttaacaattttttagaattaatcaattaggttacttttttttttttttgagacggagtttcactcttgttacccaggctggagtgcaatggcacggtctcggctcaccgcaacctctgcctcccaggttcaagtgattcttccgccccagcctcccaagtagctgggattacaggcatgtgccaccacgcccagctaattttgtatttttagtagagacagggtttctccatgttggtcaggctggtcttgaactcccgacctcaggtgatctgcttgcgtcagcctcccaaagtgctgggattacaggcgtgagccaccacatccggctcagttaggttactttctaggagtgtaagtcagagctcagaatctatcatctacacttagagtattatttgtattatttacccccagaagcattttattccttttcttacagtgaggcagctggccagtatttcccactctcttgcatgttgatgacatcttcattctatggtttttctcaccatgcattacttcctgttagtttgaaattgcctggcctgtaaaagcttaatgttgcctaaaacctcgtgggcttccctgtgctttgcctctcctggattagtaatgaaagggccaaacaaggtggttctaccccaatctctgacaatgctgctgtttttatgttttatttaaaaaaatgccagagcatggcaaaacattccttcttgtcgttcagtgcctatttaaaaagtaacaatctgtgtgccataatatattttttaagtgtaaaaactgtccacaaattctatattgattatattcttttgccccagaattgaaatatacataaatatttgtatatagaataaagacatacatacaaacatacgtacgtaggtgtatataagtatatgtataacgtaagtatatataacatgtatatttatgtatataatacacacaaaacaatgtactagctgtaaaaacatcctttaaatttcgaaacacagctattgagcagagatgctatgaatgtatggtcagaaaaaaaaaattctgtcttataagtctgaaagctaaaacttgccacctagatatgttcttaagtgaatgtgtgacccagggtaagttactggaccttcttgggactcggcttttgtcatttgtaacaggagaaggtaggattagatcagtgattctcagccccgatttcactttagaagcagttgggaaactttaaaaaatgtagatgcccaggccctatggagagattataatgtagtttttaaagattctcctgtgtgagtctaatgtgcagtacccaaggttaagaactgccaactagacaaacgctaggctctttctaggtctgcaagtctcttgctttacttttctttcctaagacagtatgggctatgccgacagagccctgcagacagagctagtcctctggttggatttgcttaacacatgtgatgctgcagaatgttctcagttgaagagtgcttaggcagcacacctactcctttctgtgcccacacatggcatctccctgtccacttgagcacagagcttcgtggcagtcatagtcccccaccgttgaggatgcctgcatcttcgtgccatgtagcattctcagagatgatctgtggcacagcatgaggagtgctcccaggtcatgtgtttcctgccacgcggccttgaactggtggccagtggccatagtctgcattattttgttacttgctatcacagtctttttgccaatatccttttcaaaatttttggtctctaatttcattctcttgaccacctggtaactttaatctctcagccttgaaatgatccatagatatagtagttaaaataaaaaaagaagaatttttaagcctattaggttctaatcacttctggacctatgaaatgaccagcaaatagtttacaaatattattaactcactaatgtcttaataaaaagaacagcaaattctagctatattattagatttatctcctcggaagtatttcttctagttctctccccacttccactgccaccaccccagtttagggccatctccctcacacccgtcgcttctccttctataacaaaaatggtagttgctgttcatgataggccctgtaataagtactttcattggtgtatttaaaccttgtaaaaggggactttaaagatgaggatgctaaggctcatagggccgaacatctatttagtgtcaaccataggtcaagctctttactaaatgctgtctctatgttatgtcattcagtcctgagagtgactattttacattataccagggaccaaatcacggatttagatgttccatacttgcccaaggctagtaaatagtggagttaaaacctcagccatctcagccaccacaccatgctgctattatttttagaagcattagtaccactgtcctcattttatagatggaataactgcggcccagagctattgaatactttgcctaagaccacttagctaataagaggaagaggcaggatttgaacctaggtctttcagattccaaagcccgagtcacaagcaccacacttggttgcctcctactctttccttatccacttgcatcccatctataaatcaggtctctctcaagcccttcctgaacactggttctatttttcttgctatccctctgctcaggaatggtctgtgtctacttcctaggtctgaaatatcttatttatttatttggacttttaaggccctctgaggtctccttctgacccccaatccttattcctagagtgaccagatcccatgccctgctcagtcagcccgtctcccttactgcatgcgacactcctcctgcctcctcccacctgcatgctagacttctcctgcctccaggtgtctttcgtcttgttcccttcatctcttcaaatagcttttcctggatacctatcctgtgctgccaagatctggaggaaagcctgaaattctccatcagtcaagctgaatccgttttctctgcactgctcagggctaccctctctgggcaacatcccctgctcactccctctctcttgctgtgcctcccatctaaactccctccaggcataggtgcagtgtggtgctcactatggactcctgtatgtctgaagtcataagtgaactccatgagggcaaagaccatgtaaaacaatcctgagcatacagttgcttcataaataggcatcagatgagttattaatctgtgataatagttttttcccctcaaatcagatggtttgttatgttaattctgagtccagaaacacaaattcttaaaaggttgatttatttgattttttaaaagtatgtgttattgtgcttattttaaaggctaataaaactgttcttctaaactgttgctattctcctagtaaatgtcccttcaacggtaatggaagccatgtgcagacaagacgccctgcagcccttcaacaaaagcagcaaactcgcccctaccacccagcagcgctccgttgttttcccccagactccgtgcagcaggaacttctctcttctggataagtctgggcccattgaatcaggatttaatcaaatcaacgtgaaaaaccagcgagtcctggcaagcccaacttccacaagccagctccactcggagttcagtgactggcatctttggaaatgtgggcagtgctttaagactttcacccagcggatcctcttacagatgcacgtgtgcacgcagaaccccgacaggtaaccctgactctcactgctgacagtgtgtttgcttagtgagacccactgcttgccttcccgccaacttctgagcacctccacaggggaagccctgtgatttgtggtgtctgcattctggaaggtcagagagaaatgcaagaccactgcttgactttcttgcatataagggctgcacagacaggttggtggctgcagagaggaatctgcacttgccttccgaacagttctgcccaagcctaaaagagagagaaatagaaggaacgtttatgaatatcataggtggaaaaatgaggtcaggataattagaatcttctctgtcttccaaagataatatagctggctgctctgctgctgtcacagtcatttcagggttcacctccagtgtgccgtgggtatgaacttaattaagtactaagaggtaatgaattggaattttttgcttagtactatttttcttcagagcatgcaaacccataaatcctgcaaagctgtcaaaaggaaatacctactctgctagtgatgtggaggaaaacagatgccacttattcaataaactaatatccacacagaagaaaaatgttgactagatacctcagagtcaaagttggtttgaaagtttgtcaataaagaattttatggccatgaactgaggatgaaatttagctgaacaagtgaattaaaatttcaggtactctgatgagtggcacagtagatataatggaactattatttatgaatcaaaaccggtttatttgacagttttgatagctgggagcgcaaaagacaaaaatcaaattaattcaataagaaaggattgcttgtgtttttatctctccttcatgttctatgaaaacttgattaaaatccaagtatctaagaatagcattcaaaatgcactttgaatataaaagcagaagataatttttgaagctggggtaggagacttggaagcagggctcttgggttattttcttaattttgccactaatttaagcaagccacttggctctcctcgcctaataatgtacacccagctcttccctcccagctctggagggtacacagtgtgcctagaaaacccaagcagaggcagggaggatggaggtggcggggagagggagtggatattttgtaaaataataataatcaattacaggatacatgtgcacattacacatgcatacatttttatttgtgctgttggaaaaactacttgcttagcatcaacattgctgtagctaattaatgttgaaacattaattagggttgttaaggcagctatgtcttcacaatctttattttcaataggcgagccccctggtgagagtatcaacagacttctgcacatcttagtactattggcgtagaggtgatacaaaagttaaaaatgttttcctcattcagaaaagatatttttcaaaatttgccttccttgcaagtatacgtagaacctcaagatatgtctcttttaagtttgcaaagcattttagtagtctttaaaatacaaaagatgcattaaaatctgattataaacttgctttttaaatagagtgaattcagatggttggatctattatttgcaaaggttcattatagtcataataactaattataccaggtaaaataaaataatagttgaaaaatttctggatagtagaactttaaaagtttagctttgaagatgagatgagtttatgctgaatgccatataaagcaatgaaactatttcatggtaggtagatactgaaacagactgttttgtctgatctcagttacgcttagaaaatcatatgtgtggggccgggcgcagtggctcacgcctgtaaacccagcactttgggaggccgaggcaggcggatcacgaggtcaggagatccagaccatcctggctaacacggtgaaaccctgtctctactaaaaacacaaaaaattagccaggcatggtggcgggcacctgtagtcccagctacttgggacgctgaggcaggagaatggtgtgaactcaggaggcagagcttgcagtgagccgagatcgcaccactgcactccagcctgggcgacagagtgagactccatctcaaaaaaaaaaaaaaattatatgtatgtgttatgatgtctgtcctgtaaaataataatgtcataattcgtaatatacttatgtatattatcagaaaaaatacctgaaaaactagaaagcttacgtattcaaaatacatttcagtgggagattgttaggtctatactgattccaagctaatttagagttactggcaaaaatctaggcggcatgagactcctgtcttatcatggaccctgatgggcttatttgattcagatgtccaagtgtggaattgccagcctttccagatgaggtgaagtaatgggcttgttatctgggaaggtgccagagtgggattaaattactgaagcagtgggttccttccctgcagtttgttggtaaagacttgagaggtgttcaccatcattcttgaataagttaaaataaaaaattacttcaaaagatcagttcctttataagcaaagtaataaaatacaatgtttcttagtaatgatgaggaaatgcttgacttacatcatcacatctgagttgattgttgaagataaggggaaatagagggagatatccagtcacttggaccccctaatttcattctagttacataatttgcttttagtataaagggctggaatggctcatttctgttccggaacccagtatgctctgtttgtaccagaaagtttggagataagagatactctccgtaatttcttaaccacatgggtgaattgctaaacggaaaaaatgtacagaactgtaatgggacatcaaatttgttcatgacagtagctacgtttggaacctttttatggttattatccacgtggattattactgctgaatacaggttgagtatcccttgtccaaaattcttgggaccagaagagttttggattttgggttgttttggatttgggatgtttgcattatactcactggattagcatgccaaatctgaaaatctgaaatctgaaatgcatcattgagcatttcctttgagcatcatgttgctgttcataacattttggattttggagcattttggattttcatatttgggatgctcaacctgtatacgtatattctttagtgattgattccaaagatcagctggcctttagtctttagcaatatatgcccattcagccacttacagtgaaaaggctggatagttagaatgcatttcccttgctcagaaaactcaaaagcttttattttgataggaaaatcttgctagaaccaggtacaagaaaggcaagaaagggggacacaggagagaaagtcagaaggtaaaacaggttagagtttcaaacaagtccaaatttgaaacaggcccttgaatctgaggtccaaatgattttttattcaatggactgaatatttggccatgaaaccccagatatttcaacctccatccaagagactttgtgtctgtattcatgagctttttcatgtgagataccatcaaaagtctatgccttgatataaaggaaagaaatccgtagatcctcagggatcccagcctcaccatttattttgttttatttattttttttaaccactgtgttattcacatttaacacagaaaaaaaaaatctgtctgacctggcaaagtagaaatcagcactaaagacaaaaaacacacccatgagggtccaggaaccatggaattattattacttgattttgttctgttaagcaaaatcaaaaatctcttcctcctttttcccaggctactgactttttcttttcctgaataaattcgaagagaagcagctgttggaatctaaatcaaccaacattttgttcaggaactttataaacatttggggttttgcataagcttattgcctaggccaaagtagcttttcttgcttttgctcaaaccaaaagtgcttttgctcagcactcccattgggggcagtatggtggtggggggtatgctccagaaaggggtaagcaaagccttcaatcacaatggattgttttctgacaagtatgttctcttttatttcctgcagaaagtgtctttataatgcttatttttattttgcatcccttttcttttcctttctcctttttgactgtttgtgccacatggggcaagtctgccttcagcctcctgggcacaccatcacctattcacatttgtgttttaagtatcattgtttgtaagagatgtggtgggatcagagggtaaaatgacattagaaggggctctctgataggagggcctggagagaattcatcatcataatagtttcttagaatgtatcagtattcttgtgtcccacttcttccccatcccccaagtgtgaaggttatcttctttctagctttgatgttcttcaggctgtttagtcttgcacttctgtcactgtcctgaaatatttttctccttacgtagaactgagttcttttctcactccacccagccagcagtgacctaagtaatctctctttgaagtcttgagagatttgcacttgggctggctgatgttgaacaaggagagattgtggccccaactgaacaagttttgtcctggaggccatggaagaaaaaattaaagcaggattaatatttttaagccaaaccatacttaattttgttaaatgtttcatccttttcccatgtatacaccaaaccaattacagattaaaagcaaatgaattgcacattttactggagttatctttggcaaaggaggtgccagtgaccaggagtgccaggagatgtgcaagattgtctctctgccttctttctgcttaaacatttaccagcattgatatataccaactaaatctacccaggtgttttctgttcttcagttctttctttcttaaggagcacctttctgttttttcatcaagctgggtatttctgtgtcagaactagccacacaaagctatttacatttaaattaatccaaattaagtaaaatagtacttcagtttctcaggcgcactagccacacatgaagtgtgcagcagttgcatgtggcttgtggctccagtattggctagctcagatacagaacagctccgtcattagacaacactactaaagatctcaaatggtaaaaaaaaaaaaacaaaaaaaaaaccataagttacttgtggttgtgagatactgtccttttgtgaggcatactgtttgcctttgctttgagaagagtgaagtgctatatgtctatgatgatttagagagaataaagtgctttaaaaaggagattttgggactgggcacagtggctcccacctgtaatcccagcactttgggaggccaagtcaggcagatcacttgagcccagaagtttgagaccagcctgggcaacctggtgaaaccccatctctacaaaaaatataaaaattagctgggcatggtggcacgtgcctgtagtcccagctactcaggaggctgagaggtggaaggatcacttgagcacaggagtttgaggctgcagtgagccacgatcacgccactgtactccagcctgggcaacagagcgagaccctgtctcaaaaaattaaaaaaattaaagaagatttccatttagttgtgcaatgtcatgagatcctggaaagagtaaagctaaactcagcactcaagaatgtcagttcttaagagtgtctccgagtatgacacatcaagggaggcagaacttcagaactgattatatccaaaaatttaataagtcttaccttttggtcagaccttggaaaattaatgggaatgttggttgtcagaataaaaagctgagtaatgacaattaattgtgcgctccaaaggccctttggctgtatattgaaagacgtggagttaggatgtgctaattgaaatgggcaaacatagtcttaactcctgtggccagttgtcccaaaagaagttgtgatgcctgagattccaaagtgatgaaaatgtttcctaagctctgctgttgggcctgaagatttaatttttgaacgtattcctgtttccctggatgaaaccctaggcacataatcaattttaaaattactttttgatcattttcttttattcatattttaaggaaatattgaaaatacaagaaaagggggtttaaaggaatcttgtctacttacagtgtaacttctgtactttctaagggctaactttctataaatttctaggctgaaagagacactgttattatagtggcaggtgaggtacatccttcagttctaaattctatacagaatcagcctctgcaaaggtgtatgtgaccaagtattctaaaatcttatttttcaatgtacctaagaatgaaggaatattgctttgcttttagagattaactaaaacaaggtttggtcctatattttggtactagattttcttactctgaattctcaactttttaccaatgcatttaaattttccatattccaatgagcatgtacacacacacacaaccatagaaagctccatgtatagggagctgacttgtagacatgatggagaatagagatcatattggtgatgctgtatcttgggaggcagtgtattgtacagatttcctgggtcatgcacatttgtcaattacctgaaaacaagaacaagcatgagatgcaagagatcatcatcttcagtccattccccttaccaggcagatgagaagacaggtcagggaagttgagtggcttgtccaaatgccacagctgatcagagtcaggggtcctatctctcccgttctagccccttccattcagtcaacctgagttctgcgaagttttaaaaactgtgccataggtcactgcatccctagcatatgcctctcaagccagtgccaggcaaaggtgatgttttagaatccgatttgccttccattggcgttactttgatataagaattcaacataagcctctctgtggtcatttctgttctcctgtgtgtaaacctttaccaccgtgaactattaacataaaaaggatggattgacttctgactgtgagaaataaatcaccccaacttttgacagcagagttagaaaaaaaagaaaagattaattggttttatttagtggcttattgtttattgtgatagccattaaaaatagataaccagaggctaataaatgttaatggtcccttcactattagaaaaatcaattgtcagtgaatatagcatatattaatatattattttgtttataatcttcaataacagtttagaaaattcaaccctgagagaattattttttcaggaaccctttcaagtttaatgtttgccacaaagaacagattcggcaggaggacattttcatctacatataattttaatggttttcaaaggattattttatgattataataaaatgcatgtgtaatttggcaagattgataaactccttaccaaagactttttatatatttctttgaaacttgtttgagagcagttagatagatttctaaatgtaagtaattaaaattgtatagtattgagttattgaccaatccttggctattagtcaagctaaaaaattctacaatcagggctcagtgtgctgaagcctggtaaaataatagtatttgtgttcagtgaggcaagtggccacaattaagcagttcacttgacaaatgagagggtacactttattttgcacttaattgaattgttgtacatgctcagtcaccattgtctcccggcccttcattttggtttctggtcattggagcttgtgcatttgttaaaggttgagcaattaagtctgctttcaccattggtttctgagtgcagccagaaatgtctggctcataagccagggcttagtgaatgctgttaatatccctcacgacagattattaattatctgaacaaaaattttgataaacaaattagaatcctgtcaaggaatgatatgaaatagctttgaatagggaaaactccctgggttttatatcactcaccagattctgcttaagtaagcagaagaacttctgtagagaagacagaattttaatctattttatgaaaaccaaaaattgatttacttctcgtgagctgggaagaatgtgctctgataatcttgctaattatcaggtatttgtcaccacttccttccatttgcttttgcatcagaatcatccttctgcaagcacaatgacatcctatcatttctgtgctgctataaatcatgccttgctgccagattcaactggggaggtgatgttcaagagaaagatctaatggataaatatttggaggagggaatagtaggtagaagtcaggatatctttgacaaagagacacatctgggtgtacatctgtgttcatctgtgcaataccagtgattatgctataagtccaccacagtttaatatccgttaaaacacacatgtaacttgctgacttgcctgtgtgtttacctggtacttaggatgaggtccaaacatcctagaacggccttagtatcaagagcttgtgtcccgggaggacagtttatcctcagttttctgaactaacagagataatagcaactgccttctctgtcccaggggattatcataaagattaaactggataactgattttaaagcactttaaaaagatgaaagtgctatggaagcacaagagacaattatatattttctcttgtaacagtctgcttaatgaagtctatactttccctacttacaaaagtaccctaacatttgcctggggaaagataaaaataagaaagtaggggtttccaaaatggtatgattagtactggaaaggggtattcattcgggaattgatgtgtctcagcagctctgtgaattttgttcctgtggcaacaagtaaagtagtgggaatccagtggccaaagctctatgccctgtcttagaaactgagaaaatgtcaccaataagttttggccccttgtcatatgattctgacttccactgaccaacgcagaaaacaatgaccagacagtctgtttatttgtttcagaccctaccaatgcggccactgctcccagtccttttcccagccttcagaactgaggaaccacgtggtcactcactctagtgaccggcctttcaagtgcggctactgtggtcgtgcctttgccggggccaccaccctcaacaaccacatccgaacccacactggagaaaagcccttcaagtaagtagtggctagccctccaccctctctttctcttagcctttcccaagagccagctgatgcatcagcacagtgctgcctggcttagccagctggcacaggctacttggaaggccagtgtccaggctgcaaacgaatctctccttgtttagtggctgacatttgaaaaatgaagtcaggaaacctatgcactggtcctagctcaagttgccaaccttggtcgtgagacaaatcttctgggtctgttttctcatcattaaaataaagaggtaggagtaaataattttaatatttttttcagtccctgatgatctgtgcttctggaattttatctaggagcgacacagagctcctgtggccatcagcaagccttacgatcatcagaaaggtgaccacaagtttagaacatccgaataatccccttttggagaacttgaacccttcaggattctgatgaaatatatcctcctctttcctatgtgttaaagagtttgaacctattatagcagccaacttgtgacttttcagtgtatactttggactttagaattaccatgttggtgaaaaaagaaaaacaaaaccaaacccagagtacattgactttttgaggattcagggaatgtggaaacagatggaattgaattctaagggctttggcaagataatggcatctgagcaagagagtgtgtttctacacatggcacacttatccaaatggtggacatctgaatccgtgcaagatggtctattcattcacttattcactcattcattcatttactcattcagttatgtatgtgttcattcattcagctggtatttaccaagtatgtacttttttgctaggcaccctggtaggtacaagagatacaaaggtgaatgacatttagctgttcctccttttctccatctttgaaaacctcatagtctaaggggaagcccaattagtaaacgtattatagggtgaaaagtacaacagtaagacatgtatgtatgatgtttcacagtagcacagaaatggagtaatcaatgctatctggtggaaatgatgtttcagatatgttttgaaggataagtaggagatttctagacatacggggcatgggggaaggtatttctggccgtccaaacagcaggtggaaaggcctgagagtgtgagtcagcatgcatggttgattggtgttctcagagcagtttttatggtctgtgtgatgaactcttttcagttcaaccctcttacagctctcttcactcatttgctctactggctttttctgtttgagaaggagaattaaaagagcatagagttaccgccttatgtaccttctgtaggacatgatcaagcaagagaggaaatgattcaggcagtaggagactaatccccctgctcagtctcagccaagaagtcttcccagagcctcattacccaggattttccatccagacctgctgtcgtggcgcactttgtgctcagcctgaggccaggctcagcttgggaaacagagttctctggtctgggtcctgccttcctctctgtctgccagtgaagggagaagttcataaaagatagtcattgtccctcttctcctcaataattagttactttattcagcattcttaactattctccaacatagtttaatttatggtgttaataatcaaaatagtgataatttttgttgcggtacataggtgcagcttgttcactgcataagagcatctggctaagtgggcaggatggggcctaaaatcaagtctgtactatgccacccatgctgtgccgcctgaggctgcaatagcccaaagagggcatctttttctaatccaccctaaggagctgcatgggctaccacagtcctaggagttccctatcaccagtgcttgtatcctgcctagtggactttgtcattgccctcaggcctgagccccgtagggttcctaggttctggcttcactgctctggaggagggtgttgacaatgagtggcacgttgcctgtgcctttgagcaagagagcttttcaaaagcagagatacaggagggttcaggatccttctggccccttatattagaaagggcagccagaccaatacagtgccaggagtcagattgatttttatcttgttgctgtgtaaatagattttagtaattaattgaagcggtttcagggtcaaaatgggaaatagatttctattaatgttaaggtgttacttatgtgtaaccttgttgacttcactcaatttttttcctttaacatctgtttttgtcatgtttccaatagagttgccattttaacttaattttaattcatcagattaatatttgaagggctttgctgattgtatttttccttttccaaaaatatatgttttgatcatacctactttcatctggaaaaaaaaggaaacaactaaggttgttggcttaaattctgtgtatatgttttagttctttctgttcctacttttatctagacagccacatgctgtagttgtttttttttattttaatttatcaaatagatattcccaggggagagctgagtgtatgcttattttgaaagtgcaagatttaaacatcttctaggaaatggaaagttaaatcctttagtgtatacaaccaggtctttcagaattgatctatcccaagggaattttgggaatcttccaaccatagctcatggatattcatcccatggacatttgtaaatattatgaagatatccttttacaagcttataaaacaaacatttttaaaaaccttttttttgcagattagtcaataaaatgggtttctctacaacagttaattttactacttcaactaatgggtattggcttacacaatgttacaaagaaggagaagaatcttgtaaaggcacataaccctcaactgtatgtcttggggagtttccaaatagatgccccagatggctcagtccccaaattgtcccacccatccagggctcaggaggcctttacagaattctcagggttgagctgagattaagcttgccatgtcagagaaagccctttacaacttctaaaatcttctgctgagaagtggtttttgaaggcatatcaagattactgccatccaaagaaggctgcagaagatttggcatgaagaggtcagagtttcaatccaggctttgcctcatatctgattgactgaaattccactgaaagaatccatctcccatgttctaggtagatgatgggcctgtcagcagctaccctaggccgtagacttaggatttctaagataaaggagcatgtacgaaaaataaaaattggaggatcacattgaaggtcttggctttcaatttgctctatgatactggaagtcatggaaaacaaggagcaaacgcaagatatcatttaacagcaatggccaagcattttattgcaggcaggcaggaaggaaggaaataaagaagttagttggcagtctaaaaattattctatgcagcaaggactccttcctccttcttactaaacagtgtcttgatatttcagtgggctgccctgctgtgcctgagaggatctgtgtgagctgcccgaagcctggctttctgaacctgggaaactgagaacaggccagaattttccttaggaggggttcttcattattgttagaagcaaggagaatcattcatcgctatgttctttcatcaagaaaatggagtttggctcatgatgaaaaaaatcaaaggaaattccaaaggacatctaatatttgaacaagatctaggcaaaattaaagcaaatccaagaagcaaatcagtaaatatgcattgaacacatcatacatacaaagccctgtgcaatttggttcaattcaaaaagtattttgtggcatatcatagaggcacagaaagcttgttgcaggttttctgtggtaacagaacttgacatcgctttgttaagctcctcgtacatataatccagtcaaccatcatagtaagtaaagaatgatctcaaactttagaggtaattaagtctaattaagatgctcacaatggtataatagaaactcctcacaatgaggagtttcttttagctgaaatacttagtagactttccacttcattgttcctgagatactcccgtcaaggctgtggcatcagcacctatgctaagggaaggcacaacgaagcccctgagtgcaagggcgcttttccctcctgacgcattacctgcatcttttcttccttcttactctgttacactgcacgaagtccaggcttagagatgcccctgccagtcagtcatcagggactgtaattcagggttagtttagatgccaaccaagtgaagtctggctctgacttctgttgagtcagttctgttgagatgagtttcattaaagtatgaaaatattttgtggaagagatttctctaaaatgtaagataatgaacataaaactgaagtccttctcttatttttaaaaaatatttttatatctagctcttacttcctcaaatatataaattgcattcttgtcattcccagacaacatagatattatttctggtagccttctttcctcaaggagaactccctgagaaaagattctaaattaaggtaatttctacacgtttgcttgtatttttactcacacttggtgtgcagatggctctagaaatgatttttctggaatactcttcttatgcaccctatatattggacaaattttctgactattacaacaaattgttccatttgtgtaaatatctgcagtgcatttaggcaaacacttgagaaaaatgtgtttttctcttagtgtctccatccaatctggatgttaaaatattacatatagacatacacttttgccttatatgaagcactaaactgccaactcgtgtattcctcatattctaatacacaagattaaaaatgcaaaaccatgacccaggcacattttcatttctcacaattgttcaagctattctactctctttgaaattgattctagagcttcaagataaaaaaaaggaatataataatttgaaagtttgtcaagcagtgaaaggtagtatattttgacacactaatccagtaactaatcagttttctaataaacaatcagcagttcgctaacgtgtcatcagcactccaggagctctggagaggggatgagctgcccacggacgttaatgaatacaccaaaaatcattaggtgatcaatacttctgagttattttcattgagctgataggtctgatacattaaagctgacattatacatttgtcaagatcacagtgcagtttttaacagtggaacaggctgctaaaaatattccccgaaagacaatcaaagaaacacaagttcttccccctgacacactccgctggtgcaggagccctgaaaaatccaaatgcgaagtgaagctcctgcctcccaatgttcaaaaacatgcaagaattcccagagtggattgatgtgttctattttataggtacttatttccaagacagggcacttaatataatttactgaagaggagaaagagtggaatgcctaacagataacagggcttgtggctttcttgtctgtgataaggcagggagactatgtcatggtggcttttgccacagctttcatagtgcaggggctcacaaactggaggttgcattatttaaaagtgggacaattgtctgtagctcttcttgaatatctttttcttcaaaggtttgaggaaagggcattaggggtggctgaggtggcctctgagctgtattagatgctgggccagtgctctaggcagcccaggtaagtaaggtggtgatggagaagtcgctgtctgtgcccagccagctgccacagttcatctgtgggtgtgtgtatttacacacacaatcacaatcagccagggacaacatccacagaaaaacaacaggctcccactagattttgaatgtgtgttctgctttttgtagattgagtagccaccaagctagtaagtgaaggttgtttggaagatatggacatgggagatagggaggaactcaaagtctctagattacagtctttttttgttgttgtttctcatttaagttaaaaagaagagataaatcttgaagtgtgacattttctcctcatcagacacactgcccttaattctagcccataggtacatcctttccactgtgccactgcaaattctagttttataaattattttaaccctaagtttggttaggctgtgacactgtaaccagcttttgcaaaaaagcagcgaccacgcctactgcccctcacagtcactgcagtctaacatattgcttcctctagtttccaaattccaagatgtacactctttggctgctgttctgaagggagtagaattcccaattgtaaattagcagtaggtgaaattctatttgtcatcaatttctctttggggttacagagtagaaaactgcaggcaagctgcttctttgatggctcactcctaaaaatctctttttgttctttatctatttgaactgacagtgatcagagctgcagcaggacagggctctctggagaaatcaccttccccctgcctattgacagatccctctgttctgcatcagacgggctttgtcccatcacaggcatccaggccttggaaggagccaccaattaaacctcttgagctggtaaaatctgaagccactttggagtgtctgttctgattaggcaggatgagaggaagcccatcaccctgcaggccccgctccctggtctcaattttctctcttgcctccaccaggtgcgagaggtgtgagaggagcttcacgcaggccacccagctgagccgacaccagcggatgcccaatgagtgcaagccaataactgagagcccagaatcaatcgaagtggattaacggattgactggttggaattaaactgcaaggaaagtcatgattaaatgtcacggacacttaagcaaaaccaaagatttcctctgagcaactttcaatcagtcccagaaaaccaaaagcagtaataaaataagtaagatgttaagagatattgatcctggcatggaagtcagaccaggaaagagattatttatttatgacttagggatgagacttatttcagtggacaactaacctgggatggttaacatttccagtcccaccatgtattttgctttgtttctaaaaagctttttaaaaactgttatttaataccaaagggaggaatcgtatgggttcttctgcccaccgttgtgactaagaatgcacagggacttggttctcgttgcacctttttttagtaacatgtttcatggggacccactgtacagcccttcattctgctgtgtcagtttggcctggcctgacactggctgccccagcggggaccacggaagcagagtgagagccttcgctgagtcaatgctaccttcagccccagacgcatcccatttccatgtcttccatgctcactgctcatgcactttttacacggtttcttccaaacagcccggtcttgatgcaggagagtctggaaaaggaagaaaatggtttcagtttcaaaattcaaaggaaaaagttgaggacttattttgtcctgtcaagattgcaagaacatgtaaaatgtacggagcttcataatacgttatattgttccgaagcagctcgttgagaaacatttgttttcaataacattttagcttaaaaaaaaaaaaagaaaatgaaaataaagttctttggtttaaggctggagataaggtgttaggcttcattgtaatttttttagttgtttctgtgaaagtgttgaacatgtgaacaaaaatagtgccaaaccccatcgtcaaggcccttttagcaattttatctttcttcctcttgcagatgaaccccaggagccccctttcctctctcctgagtgtgggaggagcatgtctacaaacacaagtgaaaatagcccagacaaggagactttgagaggaggaaccatggagaaggttgtggttagaacagatagcccaggagcagctaattttatcaataggattactttgtcttttcttgagattgattaattgaaagagaaggaattctccacacaatttcactattctttgagtgctgagaatgtgagtttaatttcagctagcctgttggtggttcaacagtggtgctcaatgaaattgggtcacatttaatgaaatgatctagttttgggaagagctgatagctcccagcagcatctcagcgactgtctaccttgatggccagtttagataaaaactgttcagttttatctagagtgtttaataacaacagtttctgtttgtaaatttcatcatcacctgatatcaggacacagtcttttaaggaactccttgtctttgagctttcccattgtcttccctcaataaaaatgagacacataactgaactcactactaaaaggcaaggatactgtgtggtttagtttaatctattattatgtatctggctctgagaaaatctctcttcccttttaattttgcttctctattccttagcaccccagctaccacattttaaatggaattcaacagggtctaattaataagtgtttacagttattatttatatacgtatatatacatatatacacataataataatctctagaaccctgggccataaagaaaaaaatggctaattctgacctctgttgcccaatctcaagccattcacctagaattttcctccagttcttactatctcctggtcatgaaagtagtaaggaatctatgctgctgtataacagtagctgattgaaactattctctctggtagttaggaatgtgttctgattttacaattccctgccctaagtgatggatacgtttgcaaacaatgtgcgtcactgggaagtgtgaatgaaatgtagccatattaacctgaaacctgcaagaaaaggacagatcagcttcacagatgagtaagctgttccatttgttaaggttgaaagatttactcaaactttttgaaaacaacagtagggaatcacctgtatatttctaattttttttttcatttgaaaaatcagctcagccatttgccacatttcacagtggaacaccatgtactactcagttctcatgagcttcagaacgtgggagaatgagaaggcttccctcctcccttgatgtctggcatgggaaggttttccttaacaatgatctctctgccaccctgatagctttgctagctgatcccaaacttcca

SEQ ID NO: 480 - DNA, 23043 bp, Homo sapiens
  source 1..23043: mol_type = genomic DNA
ccagatcttttacataatgccattctgccggacacaagacagctgaggggtggggaggtgtgtcttttaatgctttgggatgggagtagatctggcttgccctcattttatttcttactcagaccacccgccactgcccatacacccaatcagctccctttacattgggctaaggctcagggcatctcggagacagtggcgaagcagcagagtttgagttcccaggacatatctcctgtcccctggctctcatccatgctcatcatttccttgagttcgctccctgcccgcatccagattcaggaaagggaaatagttttcaaaattaaagaaataaaagcactaaatgggatctgaaatgaaaggaaggaaggggaaaaactacacttcccatcctcccccctcccccatccctaatattctcttcttccctagtctaaacgtgcaaggatgagcttcctacaccccatccctttggcagcttctcctgttctttcctcttccaccgtccacaggaaactggagcgtgtttatccccaagggtgatatcccgttagtgcctgtcccacgttctggctgaagtagctgtcttaaggtggaggcgtccagaaatccgtgccgtttggggagcaatgtttcctggagtgggatggacaaggtgggaagagaggaaaatgagcaaaccacttctgacggacagcgggtgtgtgagcgtgtaggagtgcttgggttgtcctcgcccagctctccatccccggagggagaatggctggaggggggctggtggttgccaggaggatcccctctcttttgctaaacctgcgggtaccgggctgccctgtaatcggcgggacttgagaacggcaggcctccgctcctcctccccaggggccatgaccctcacacacctccccacaccacccctcccgcgacacacacgcagtacttggggcgactgggcgccactcccacgccagagccctgccccgcgcccgcctggggccgagcagcctggccccttctcttgtacccccacccccgcccgctgccgaggctccagatggcttctccttgcgctcggctcgcggcccccagacgccgcccggcagcagccggcggtcgctccctccctcccagctgctgcagcagagaccggggccatttcgcgaggcggacgggctcctcggcaggctccgattggggtgggagagcggccgccgaggggcccgcagtagctgcgctcccggggaaggagccccacagtccccaggtaaggaagccgcggggcaggcgaagggcggggaaggaggagcctgagcgttccggtacccaaccctctctctttcttgaccttcctcccctctgccccttcatcctgggcgcggagggcggaacagtttctggaccagagcacccgcgagaagcagggagcggccgcacagcagccagaagagggcgccagcaccccggggccggggctacagggctggctctgccccggcgtcccgcccccgccccggggaacgctgcctctgccgcaaagatgcccccttccgctggaaagcggtaatgcccaccgcccaccgcgaccaccccttccccatttttctcagttctaactgtactcctctctcgtttcctttttgcttctctctctctctcccccctccctcgtcctctcttcctctctctttctctctgcgcttgttttcttacttccccctccctccccgcttgcaccccggtacttttccttttcttttctgatcactggcggggggagggtttgtcgcccgccggaaggtagtgtggaggggatggatgtgtttcacgctcaggttctggctctggctcctctccataggtgcctccctgggtgctcgcgaaagcagccctgagaatggcagctctcagaggttgaagtcattcttttcgggggacggggcacggcgactgtttgattggggggtgagttatgcacttggggcagcgcttccctggaatgcagagctggggatttcccttgctagacggatgcttaaagttcagtggctttgtactgagcccctttctcccctcgaaaagtcatgacagtcaaaagtatctctctttctctctcccccgccccccacttctctccaaaaccctaaagacagcctccccggacagtcttcaccgttttttttcagaagcagttgcgctgggggtggggaaagggagggaagggacattgaaaggccgcagtggctggcaactccgcgcccgtccgatgtcctctctaatcccccagtgttctggcgcgtacccacagtgcccccagaccctccgctcgcccgtgcgccgaggtcgttgggttttagacccagagagcacgttccgtaagctcccggcccaaatcccctcggaaaaattaatcacaaccaccagcggatgcaaaatgtgtgcctgtgttgagtctgtcttttaatcccgaacgtaattctaaaaagcagcatcagacaagagctttattaatcccttacacgagcaaatgcgatctctgacctactagacttgttttcctacaatttcacaaaaagcctcgctagaggaatgtgcaaggacagaagggaaactgaggagacccgcaactcattagcgaaataatagggtgcacttcaataaaaatgcggtcctgaagtggagcagactcaccggcaaggagcccggaaaatcgtcaggggcggcggcaaagtgagtgatggggattggaggaaggggtaggattggaggaagggcctcatgcacagagtgtggttgggagctggagtgggaacccagttcggtctcttccgaaggcttaggacccatgtgactgaatttaggggctgtccccttgcgagggcactaggacaacaggaggggcgcacctgcaatacggatgagttcagagtttgatcccttggggcctttttctcgcacttgagatttcactatcatgtcgttcaattaatcatatttcccttctcccattttattcaaaaccgtcttccagttccctcataatcgtaatttgcgtcattgccttttatcgttgattaattaggaagccgaaaatggtaatggagggtcgggccaataaattagctttaggaacagacggacggacgtccgaggctgctgcatgggtgggcgctgtccaccgaagctggcgggggccaccgtcgctgcagctggcttctcaggaaggcgttaaggaaaaggcgcgcggtactggctgaatggagagatccactctgaaataaacccggtggccacaagggaaaacttctcactgcactaggtggagagactcctgtgacgcttagcttttcccgtttggtatagaaaaggaaagactgggttgttatagaaatggagaagaggaaggatggggtaggataagagtcagactcctgttactttcagaggcctccctactagcgggtaaacaggtttaaagtctgggccttattaggagcctttttttttccagaactggaatgttagatttacttttgcagcctttccttcctctttccacttacctactggtctgaaagagggaagaaagaagggaggaaataagggaggaaggaagagaagggagagagagaaggcagggtggagagagagagagagagagagagagattgattgtcaagatcagatcagttaactccctggccaaagaggaaagttgctaatgtggagttgctccctgccctcaaagaagcagcagctctgggcgggtagggtctcctcttttctcccttcatgaaatcgatcacgcctccagagggctgaaggagagcactttgccactcttcacagctacaccctggcctctttagctttcaattgaaaaccaattaaaagtttctataaatctgttagtgccccttttatctggggacccctgatgcatgcgatattgccctttagatgcctcttccgtgttttgttttacaattgttgtatcaatataatgcggcctttcttctgctgtctctatagatacagatacacaaggaaaaccaaagctattcaggctcctcatttgtccagcagcctaacagtggtgccctttctctgtgctgctttccctgcttcgggagcagcagttatggtagaagcagatggctactgattgggggagctttgtggctctaatactgaatactttatggaaaaggactttatcatgcttcgttgggcagaggaacaagggatgagatttatggccaggaaaaataaatctttttccaagttgtggctccttctcaccaatgtctcctttgcccccagggtagaacactgaggaattggttttattttattctcctttttgctaacagcaccttttagtcagggtagtggactaagagccagaagtttacgaaataccccaggttgttgctgtatcagcattctctgccctggggcggggggaagcagaagaatatcatcttgaatgctgtttcaggccacgttttcttgaatgtcctcttagttgatgggtaaaatattattgtccattattttattatctatgaagaacagaaaagaatgctaagagctcccatttgaagtcagaggatgatactggtattgaaggagagggggaaatgatggggcatttggtaatgcaggtatgcttctctactttgaaagggtctgagctatggagataattaggggatgtctgtgaatttagggtttggggctccaaattgaatttccaaggtttgggggatatacagagtccaaccctatactggaggcctaattcaccccaagatagtccatatcatttctcttttcttctcttcacctgagttttacttgtaacttctcttgagtcaggtttgctccgcgtctgttgttgggttatgccccttctctatatgcagggggatgcaacctcctgctcctcctgtcctcggagtctgttcttctagagtaatgtcaccccccttcctgagatctgtaacataaagtcactcagaaatgctcctatagagccccaaatgcctactggcaacctggcaccaagagatggcagtcaatcccagctctgggtctccattcccatttcagacagactctttgtctccctgatttttgaaatgtcattttctgttcaagaaacatttgttgagtgtcttccatgttccaagtcccttttctctgccttttcaatccttttaccttgtacctaaacactaaagacaaaaggccaggaggacccgcattcagcttccacaagggtcacctaactttctaccacaagctacttccttccaactctccagtcactaccaccccacacactgacatgcatctttgcatcttgtttctctccaaagaggaaaaaaattgggaggagagagctgagattttaaaaattctatttacccagcattccaaagcagaagacactgagctgctttaaactttgggcatttcttttgtgctaggctgaatgctcttccagcctcatcacacttaattcttatgctgaccctttaaatatgatgttattgatgttaaatattataatatccctatttcacagatccccctgcttcacaggaaacaaaagcatagagatactaactaactcaagcaagtggcctagctgggatctgaacccaggcttcataaccactctatgagatagatgttgtctttactattttacaaatgaagatactaaatttcagagaggttatgtaatttgctcaaacacacaggtaggagattacagaccccgggttcagacctgagtgttcaaaatcccaaatatcaacctcttaaccactgcctcttggatccttcaggaggaagagcaactgggaacccacaactgaccgctattacctgatccccagtcctagcctgggcggaaagtttcatataacttgagacggtgcgcgtggggaaaacgtaaagctcccgttcagggctgctcctgcgcggaagctgcgtgggctaggagaaggaggctccgccgggcatcgcgagccagacagggagctccgtctgtcgtgcggcccacagggctccgctcgaagccagcgtgcgggcgctgggacaaggagtgagggcagccacggggggaactcgccctgcacaaagctccagtgccagtggtgtagctgctgcctccgggcatcagttacctcgtcctgccaagctccgggacttgggtgtgtaggggagggctggagccatccacccggtccgcatctgagccacagcccttcacaggagtgggaaggtcacgcgcgctctaggaggcccagagccctggtcagcgctgggaagcccggtccccaggtttctctgcccacccccagacctcggcttttggccgcggcgctggagtttaccatcaacgtgttcacatgcttctcatcctacggagtcgcccggatcagcctttaacagactgacttatccgcgtttctaacgtggcaccgcgaccctgacccttggcgcctctaccaggcctaaagaaagaacttgcaagctgggcatgggaggatggaagtcaaatatcaatctaccgggcaggccttccgcagcaaactgattgctcttgcattaaacctggggtgggggtgggaggtgcgcggtgcgggctgggaaagagggaagggatgactgcctttccttccatttctccctagaaacttcgggaaatcctcagccctcgctgggtcacttggaaagtgggttcacaatacagttcccagttttctaatgaggaagcaaaggcagtgttagtaacaataggcagctctgaaatgggcatttagtatgtaccaagcgttgttctctgcttgctaagtatcacctcagcactaactttatgaaaagggtccctttaatgctctcagttcacagatgaaagactgaagtatagaccagttaaattacctgagtggggagggctgggattcgaagccatgcagtcctggttcccctgtggaattgtgggctttcctgagcctgaattgttggtccttcttcttgggtcagttctccagacttctaaggagaatgttcattaatgaaggcattgagaccatctcgtgtccaagactgaaatgaaactagccctggctcttggaagtgatcccttaccatctgctcagcaactggctttccaaagcgcgttcgccctcgttcccttagagtcctcactgcgatccgggaggcagctcttgccagcttttgttcaaccggaggaaaaccaaggctgagctaggtcatcggcagcccagctagtaagaaatgggaacacaggctcctgccctgctaaacgagatcaggcgaccagctggtcgaggtcgtgcacagaggcagggagagagggtggtggaaagagtgttaggttcccgcaggccccgcccttggaacgcctttccgcaggttaagtggtcacctagcgggaagcaagtgatggcactaattgccggtggaaggctaaagaacatgggaaatgtggcgggcccttgggaactgcatttcctccctgcttcgcccagggctcatttggagcgtaccaagcgcaccgcttggccccacactgccccacattcacggtttgcgcactgtgcgtctacaagggcgacgccgggcagacgatggcttgttttgttctgccctggtagcctcctgtgtcagggctctgcactctttggtgaatcagctcaaacgatgtgatctgtgtctgcgcctcctgatactgtgggggcgttactctccttggatctctcccagggaaacccggtttgccaacattgaagtccgtgatttggccttctctgcactcttagttctgtcgctgtacctttcactaagacatgggcaccggacaatctagacatcaggaagtgtccgagtctagcaggcacttctgtgccttgtcttgcttcccaaacttaggactcaaactcagctgtgtggggccttgaggaggagcagctaattcagtcccccaggttagaaatgaaactcgttgcattcggtgcattggcattggctttctcgaggatattttcacaagtttaggggaaccccacttatctggaacatagatgtcttaggacttcagtaaactgactctagaatatagataatgctgtgggatagttgatcacacacacaagatattagatagtaacattatactcaggaaatatattctttatagctattcaatttgctcccttgggaccaattgctgtcctgtatgacttcacacaaactattttctcaaaaccaccctacatgaaaacatccaaaaaagagcactggctacttaatggacaagcatccaagtaaaatgacagtcctaaaacttatttttaattgctgcctttgacaacattcaccccaaccttcttaaacacacacccatacccatatatgcatagaggacaatttctgctcaggtataaagttattcaggcctaagttaaattctaggcctagcaaatctcaacatctaggtcattatattcaacatgtttattcttaggaatgtatgagtgttttatttagcaattccgggtattatttctttgaaaaatatgagttttcctttaaacttccttaaaaggagattatgaataataccacggttactatattacagatactatcaaatcagcctgggaagcatcttttcgctcagcaagttcaagagaacaaatatgttacaatccttgcctattcttgcctccacttcataatgtaagtccagaagtgtttatagtaataatgatgttgctgcatttgtgacatgttgatctttgaatttttttaaggagaccacctttccaagtattagcagtgaggaaagacttacattggtagctttcaagtgtttttgaaaatcttctgaaaactaacacctcttcatataatgttttgggagacatcccccattgatgctaaattaatacccctggattaaatcatagaacacctgggattaattgaactgaaatcatgaaagatagttttcactcagagttcagttggcaatatgagcaagggagcagtttgggagcataatttgtgaagaaattgaaccatatttccaatactctttaatacaaggtaaatcaccactattgtggttcctaactggtatccgcttctcaaatactctttgtctctctctttcttcctttctttttactttctttctctcgcttctcttttcctggagaaaatgaaatgtctctctcttcaggcctcaggaaagtgtaccatgggtttattccaagtactggacatttgtgtcccctgcctagacctctttcccagaagagccatgctttctgctgctttttccccagcagcccgaattcttacagtccatacctcagaaagctaactgggattagatgtcaaggagtgtagtctgcccaggatatatatgctgtgtgtctatcgttgcctctttatttaactcaggaattacaatccacctaaaacagagaagaaaagggtggcacacaggtactgaattgggatgatgtccattctcctggctgtgtgaagaaatttgatgtaaagcctctcaatgttgtcacattcccaaggcctagagttagacttctcaaaatttcatttgagactgctggacaccaatttgagactgctagacatcccctgatctgcagtctgcctaaaaatcctgacccagagggtaaggaggttcagagtgactgatggagaactggctacaaccagtcaacccccttcacactgagatgcgttcaaagggtgtggtgtctgagtctaggaaggactttggaacctacagatttgacaaaaatccaagccttttcttgccagatctttacacactcatctggggaagagtataacatttgggagaacccagggggttgaaatagtggatattggatttggttcagaggtcacactcacacagatgagtatggggcactgatttcatatctgttggtagttgtgcacaatgtcacttcggtttgctagcccttctaaaagtcatactcagaggccattaagccagttcactacaacccagatccaggagaggaagataataacatacagctttcaaagactatcccattctcagctgaactccaacacaagtgtaagtaaaacttgggaatggctaagagagaaagttttaaacttgagaaaggtagattatcattgtaatgataatggtggtagtagtagctgcaggagcagcaggattaaaagcaggatcatttacgaggaaaagcccaagagagaaaagtatgagtcagaagtaatgatccctacagttgggagcctgaagtccttcctcacaggctacaaaattacccaaccctgagtctctggctttcccagggccagcctggaaaacatttgctcatgtaatacccagtgagccaactacaatacttagggtgaggaacagacctaaactgagtttgcaatgtatacttataaaaaacgagtagcccttcccacaccccaccccctcacatcatcctttacccaactcagcaagcatggctcttctcgactcaccaaaatgtaaaacaaacaaacaaacccctctgggtctttttaaaaacccaccatgtatctttctcttgataaaggcaaagtggtagaaaatgagttaacaaccctctgaacaacatttttggcacaggcctggtgtttttcttaattgaccagcccatcatttctgtttctctttcatgtacaagtagtcagtaaagtttatcccttaaaaagttccttattctgaatggtgaggctaggtaatacaatactcctccttgaagatctattctcttcctccctcaaccctcacagccccttccagagacctccctgtgggaaattaataagcttaggaaggagctgccactgtctgctccattggcatcctcttatcttccagtgtgtgggttttttccccccctttcaccatgaattgccatactcttttgacaatcaagcctttgctggcatagtgctttggcaatagagttagaggtgggtaagccaggacctagaaagatatagaaaaagaaaatcagtgtgttttcattctcatgggataataatctttacgtgaattattcttggagatgttacctgcctcttatcacagaagttgaaatattttgggctccatttttgaaccctgggaagagaaagagtgttcccattctaatactccctaagaattaaaattccctttcttaccctttctccaccctctcacttaggtcataaaagccacctggggtgtcatttatcaacctctctccagcccactcttccaaaataacactacagtttcctacatgtgtatttttgccaggactccaaagagccttgctaaagtggaacaaggtgagcatacccactcttcattgtcattcttctaattacttaattggaaataaaatcctagggaagagagctccaaatatatgcataaacccattgttccatatgaattacataaaactattgactaggtacacttttatagtactgtctgaggctgaataaatgcctcaacccttcatttagtatcagtgaattccagtaagtattaatgcagagtgatttcaaagtagtttatgtaccattttagcccataaatttctacagaaataaaaataatttgtagattttctttatcccctattaattattgtcatttaggacatttatattaccaagcaaaatgtgtaccacttaaattactagaaaactcttcaagtaagaatttcgacttaatcttacttatattgttttgttatgtcagttatttaactcataataaaaagggtaggtcagattcataaaatgtgagaaattcttatatttaaggatctctacctgaaagcagtaggaaaaaaattaattagagggcaaaaaagtgaaactgaaatgaagcatctgttggccagattctcaataaattgctcccttctcagatgtataaaattgtcgctgttttctagcttaagacataaaaaggtcaagctgttccaccctcaacttaagtaccaaaaacattattttatacaaactggagtcaaggttttagtacctcaaaagaaatatagtttaaatggtctctgtatttaataagagaaaggccaggcacaagaaaaatgccttccatttagagtttattttctaaatgtccacattctggagtagaggcttacatatttacaatatgtaagataattttttaatggtttgcatggacagatgacttttcctgaaagataaaattccaattctctaaataacagcaaaagaaagcattaaggagtgttctgttagacagattaatgaaattatgttcttaaacactgctcctcacacaccatattgcatttatcagtctagtttctaagggaccacatgactctcttatggctacttttctttcttaacttgaagttgtttacacccgtgcctcttctgctctttatttttcttctttcttctactctgaattaacttaagtttctggccactattcttcaaacctgaggtttattttccagatgtttgagacattattttcacatttctaatgcttccacccattctttaaagaagtattaggggaccatgtgtccatactttgtgtgtgtgtgtgtgtgtgtgtttgtgtgtgtgtagagagagagagagactgagaagtgaatctagtattcaatggagcaatcagtcagaagacaattggtagctcagtatagctgcagattcttacatacaggcatgtgagagagccctcattgcactgagccttggtcattaggagccaaccttagccgaagtagataaaattgcacatagccaaagtacataaaactgcacttcaagaagctttctttgaaaagtcagtagctaacctgaaaactaagggattccccattttctctgaatatatggggattttgcagcccttccttctgtgaatttcagcttaattctaggcagcaattcggaatttgcctggggtactaaccagaaaagagaaggaaatacacacacacacacacacacacacacagagagagagagagagagagagagagagagaacaaggaagaacatgaacttcatgggaaagtccttgcacttgtttctcctcagcaaaatcctcccctggcctcctgggactgcagtcaccaggctgtcaaagcctcaataccccactgagttccagagaagggtctcaaagctgggagaggatcaaactaacatggtaagctgctctttgccaactccccaaatacattatttcaacactaggaaaaacaacaacgaggctgtctccttacgttgtggttctgcctcctccactttagctagctacacaatccgatttatcctaatgctgacagattgcccacttcaaagtagtggtggtgtgtgtggggctgaaggagttgagaaactgtctataccactcaaaggcctttcttcctttaggagtagagaattgaactgtgaaaaagaagcccgagattccccagcgacgtggtgttgcagccccgttgaaggagtcaacttgcaggctgttaaagacctcaagtcattagcatcagctgctgcactaaaggggcaagtcagcgcctctaagtggcttagcgcacaaacgaggctcccgagacggcctcggcaactccatcccctcctccaccacccgctggatgtgaaaagctttccggagcccatcttggtaatcatttttatttttaatcacccttgccccccaaccccaagacctcagagtgccaacagtacccattatagactccctctggggctgcgcagaacgcaccaagcagagggggggaaaaaccccacgaaaacaaaaacaaacaaaaaaaaaacaggaactgtttgagtccagtaacctgcgctcttcccaccaacctcccacaccccacctccgcccacgtacccgtgtcctgggactaggaggtaccgttatgtccccttccgaggtctggtgacattctcactccaacctcatctcccaagccacgggaaggctgagccaagttctcaccaaagcgcatcctttctgaattttgcagggggaagcttggtagtgttggcgctcctgaagagagacgacgcccgtttatcacccccaggcaactagctgcgcaaatcagcggtggctccagggctagagaatccctggagctaaccgcacccctctccctttcacggaacgcggactccggggaaatacgcacggggtccgcacgcgctgggtgtccagctctctgtcacagcttctccaagtgcctagtgaaacggggaaaggccctctccaatcattttggtaccttcctttccaatcctgaaacgattttcccctcctagcagtcccagagggcccgagctttaggaggaggcgggccgggacgctctctgagaggcgttgccacccggggtaggcgctcaggatctgcggggcgcgggcaggccgggggaaaaagctgcgaggcaggcggcgccggagggagcgcctggcccagcaaagagttaaagggaggggacgtgggctgtcacgcgtcattgggcagattatgtgcagcaaacaaaaagtgtgtgtctgcgtgccagtcagtcactgcatcgggtccatctgtacaactctctccgtttctccgtctctctccctccctccctccctccacccccccaatctttttctccccatctctccatctctctcttatctcttcaggaagagcctaaaaggcggcaacaccaacacctcttgacatggaaatacactgatacaataggcaaaaggaaacactcgattgcatcttcccggttccaggtggccttatttgggagattctatactgaccttattcctggtaagtctatttgcattgatgtgggagggggatgggaggaagacagtttggtggaaagagtagaacattttgtcttccgtctccttattatccagaagagagagaaaaataattcttgaggggctgtctactgccagtaatattgtacaaaaggaggagcgggtggtgagcactttgccggagaagccggagactggggagcgcgcggccgccagacaatgcctgcctagagggacgggccagtggcgggcagcagcgaccggctttcagaaagccccgccggctctggggtatattcccagggcaggcggataagaacctgggcctagagcggggcacggagctgtgaaacgttgcgtggcaaaggcgaccgcacgcgggcgggcgctcctaggctcttgcccagcggttattgtgatgggcttgaggctcgtggcgcctggcgctgcgactccgaccgctattagcgcggcgtagtgaggacctttttgccgtattgttaggtagaactgcattttaatgactgtgtccctgctgttgcccgaagtgacggggcgacctcccggcacaatgaaatgcttgtgtgaaagagatttttaaaaggaagagagaaattggggaataaaacgctgaattgaaggaaattgaaaagaggagaataggattccgttgaaaaggagataagaggttatggggtttttaaaatgtattttaatttgaaatgaaaaaatcaggatgtctaccttgtatggggtaaaaatgaccagggatagatgatgcagaataaaaaagtttctactttatggatattttcccttatttctgctgtctgggagatacagcccaacacttgacatttgggggatgcaagaggatgaatggaaaatgaggctaaccaaagttttaggctatgttagctggaatggggggaaaaaagcacaccttgtaatcacacgtgtaaggttaactggttaatataaattaaaataaaaatagatgtcactgacattattccataatgaacagctttgcaggaaaagaattagatctactctttcctgctactttaattatataaaacatacataaataattgccaacagtgacattattagggaacaacaaacttggaggaatattttgattagtctgaaatactaagcaatgcagctagttcaaagctagtttaaaaatttaaatacctgggtttttttgggtttttttttttttgttttttttttttttttttttttttagtgataagtcttgtatggggtgtccagaggaaggaaaatgtccctttatgacaccttaataaagggcattggggcattactttctaaattgctgcggattaaacagctggggagcccactgaggagtgctcaagcagggctgccccctcttgcccaaaaagggtcatatggggtagggggagtgaaaatttaccagtcattacacacagtatttcagactggggacactttaggcctgtcctgtacctgctcacttcatgagccacatgtgactcaatccacccccttgtataacaaggtaaccgggattcactctcatccataaataagcacgtccagaaaaaaaaattacctctgcttgctgcttttaattaaagcctcagaggaacagtgttggattatggtaatgagcagacatacgtcccttcttgtaggctgcagagaaaggttagctgacacagaattagtggccctgacattccacttgaaatccattcgccatgctccgctgtctccgcctgctcactaacgctgttcccctccttggaagaaaagaaaaaaatcagctcccgggcacccagttcaatacataggcagacaggcactttcccccaagggttagaagtttctttcagtaagggaagtctataggctggtttaaaaaattatatatatgtatatatatatatatgtgtgtgtgtgtgtgtgtgtgtgtgtgtacatatatatataattctgcctggaacttcacctctaaaacctacccaatccaacatcaaggtaatgcaaaaattatctagtctttcctagccctttcttttctttctcccaagcagtcagctccagatctcccactattctaattattttaacaagtatcccttagttttcatctttaaaatatgccatgtttatctgctttaattttgaaataagagctatgcaaaaatcaggcatgtgcaaggaaaatctacctagtatttggacagttctgcttgggttaatggcgttaaaagcagtaacataactcactttcttgtgctgtgtgtctatctccagtgatggaggatactggcatccagcgaggcatctgggatggagatgccaaggctgtccaacaatgtctgacagatatttttaccagcgtttacaccacctgcgacatccctgagaatgctatatttggtccctgtgtcctgagccatacttccctatatgacagcatagctttcatagctctcaagtctactgacaagagaacagtaccgtatatctttcgggtaagtctccactgtagctgtgtaggtgtatgagggtaatgtcctgttggaaatggactaaaaataattataatgacaagtggagataggttttgcctgtggaaaaatgcaataatgcaagcaatcccatttcacacatcaaaaattagaaaaggaaaattaaactcaaattattgtcaactgattttttggaataaatgacaaaatttgatttggaatgttagaaatatctaaatcagtgcttcagttctggattatcctggtgatgaacacgacttcctaaactctgggagatttcactggggtggaggctatttgcatactaactagtttctgcaagttctttgacaagtattgggtacatctgccttccatttgaggaggcttcttcatcccctaaagattagtttctttggtaatattagctagtgcccagagtttgtatttaaataaaaatgtttatggttttgacagtaaagcatcatcaaatccatatgtctgaattggaagattcagacctctcatttcctattcttctttacaaagaaaatctattaattgttctagccaagattaggaacatgattgccatagcataatttctaagatctaagcttgctttatttctgaaacaaacaaaattctccatacctttgtaatgtggaataacttagaagtaaactctcaaggggttaacactaaattataagaagaaatttcctcatttagtattcaaccaatatataaaaacggtgacttaaataaactatatgattgatgcagtgtttcaaagaatggttatcttgcctaatggttacaaacatgaggacaggtcccagcttgggccaaacttttggaagcgtggtctcagacaatttttggaaaagactaacatagaagaaatggtcttgattcttctgatttcattccctcatgagggtccctctccccctctccttcttgtcttctttcatttatttcaaaccgcaggtagacacctcagcagcaaatggttcctcagaaggtctcatgtggctgcggttggtccaatcggccagagataaggaagagcagaaccttgaagcctacataaaaaacggacagctgttctaccgctctctccgcaggattgccaaagacgaggagttactagtttggtacgggaaagaactgactgagttactcttgctctgcccctctagatcccacaacaaaatgaatggtaggttggctcgcgaccggcgtgtgggcccttaactagcgggggagagacgcagggagcggcaggggctcacccggcgcgttggcgcgcctttcttcccttcgggtgtctcataggaagattctgagatgtagtctggaatgaagttaaacagataggtgaggataaagcgaggaaacttgcttgtttgctgtattccctccaaatcaggagggaaagttagatcaggttggtcattcttttctcaggcactcaggccctgagaaatgaaggtggatttgtcaaggggatggtggcaaactggcttgggggcgatgctgagtaatcatgtggtgtgcgtgtgtgtgtgtgtgtgcgtgcgtgcgtgtgtgtggtgtttgctcactaagcagggtcgtccccttacacatgcctggaatgcagccaacgtttccagtttgagttcccctatgtggcgcatctgcgtttccgctgccccaagagacttcacagcgctgatataagtccccaagacgaacaaggcggcggcgtgggcaccaaggaccacgggggcggcggcggcggtggcaaagaccagcagcagcagcagcaggaggcacctttaggcccgggtcccaagttttgcaaagccggccccctccaccactacccatccccctccccggaaagcagcaacccatccgctgccgccggcggcagcagcgcgaagccatccacagacttccacaacctggccagggagctggaaaactcccggggaggcagcagctgctccccagcccagagcctcagcagcggtagcggcagcggcggcggcggcggccaccaggaggcggagctgagtcccgacggcatcgccacgggcggcggcaaaggaaagaggaaattcccggaggaggcggcggagggcggcggtggcgctggtctggtagggggccggggccgcttcgtagagcggcccctcccggcctccaaggaggatctggtgtgcacaccgcagcagtaccgagcctcgggcagctacttcggcctggaagagaacggccgcctcttcgcgccgccaagtcccgagacgggcgaggcgaagcgcagcgccttcgtggaggtgaagaaggctgcccgcgcggccagcctgcaggaggaggggacagccgacggcgcgggagtcgcctccgaggaccaggacgctggcggcggcggcggctcctccacgcccgcggccgcgtcaccggtgggcgccgagaagctgctggccccgcggcctgggggcccgctgcccagccggctcgagggcggcagtcctgcgaggggcagcgccttcacttcggtgccgcagctgggcagcgcgggcagcaccagcggtgggggcggaacgggcgccggggccgcaggcggcgcgggcgggggccagggcgccgcgtcggacgagcgcaaaagcgccttctcgcagccagcacgctctttctcgcagctgtccccgctggtgctgggccagaagctgggcgcgctcgagccatgccaccccgccgacggcgtgggccccaccagactctatcccgccgccgcggaccctctagcggtgaagctccagggggccgcggacctgaacggaggttgcgggtccctgccgagcggcggcggcggcctgcctaagcagagccccttcctgtacgccaccgccttctggcccaagagctccgctgccgctgcagccgcggctgcggcggcggccgcggggcccttgcagctgcagctgccctcggcgctcacgctgctgccgccctccttcacctcgctgtgtctgcccgcgcagaactggtgcgccaagtgcaatgcctccttccgcatgacctccgacctggtgtaccatatgaggtcgcaccacaaaaaggagtatgcgatggagcccttggtgaagcggcggcgagaggagaaactcaagtgccccatctgcaatgagtccttcagggagcgccaccacctctccaggcacatgacctcgcataattgactcggaaaggaccccagctttccacgcgcgcgcaagcacagttaagccacctgcaggaataaacacgcgagaacatccaccgcttccttgcaccccgaaaccctgcacaaagacacatacattcaccgcccccccgcccccccaacgcgcacacacacgtcctctcctcccaggaacctcattcaaatatttacccgggacacacacccccccccacacacacacacagacacactcacacacaagagccaggatggtggagttttgattgggtgggttgtttgagggggttttcttttgaatgcacgcattttcactttccccaaaacaaaggtacattttttaaaatgtcatatattgcaacatattgatgcatttgtcatacgtttctacttaaattattaagcacttacgatttagatgtaataattatatgtaagggcaaaatttattttagatataaagtaaaggaggagggtgagatgctttctgcatttcttgatgacagtttgtgttcctacaaaaataaacaaaatgaataaaaagggatcaccattcaatttgagtttccagggggaagtgcatgtataatgaaatgataatggacttcaatgaagaatgtcatcaattatgtacatatgtattttcttttaatacaaagtgtaattttgtgccagtgaaatggagtctgaatagttatgtgtttcttttatccctggaaatatttattaaactttatagtttatccgagtatgttggatgctttgacaataaatgactattttcttcaaagcaaatatttggaaagtttttaaattttatcgttgtagttaaggactatactttgagtaaatgtcacttattttcactgagttcctgaaaagaagggaagaaacagcataagagagaatgataaacctggcaccatttgcatttatgtactctaagccaattttgagcctaaaagaagataagtttttattatcacttcgaaaatatttagctggaaagtgttgtgcatcttgatcaaagacaaatcatttagacaaagatgcctgccatgcagctaacctgtcactgggacaccagcattcttttcagcagcaggataattagcatcttcacaaatggtctgagacaaacaatgttcaggctgggatctgtgagaccagatgaaaagcccactttaggttctactagtgatggctaaatagaagggtatcttgtactctaatgtcattacaatggcattctgtcataagctatttagagatcctgtggggagtttccctaaaaaccaaggtggaatgaccgtggtttgatcatggtctatgtattgcaaggcccatctttccttctaaaggcatggacaactgtatagcctctgcaaaaaacgcgtcctgaaacattacaatgcagaaaaacctgacgattgccctcctctttctactcttccctttatgaaaagtacttctgtactctttacatactgataactaattaaatattgagtgtagaaagtctaggtgtatgtgatacgaccagtaaccattagacataaaaccaaatgaacgataattctttaggccttaggatagcatgcacttaatccacaggcatcttcatagtcactctggaaacaggcactgcactggtttagctatcacaggagttgtctcattttttttctcctttcttcacatcctgaagactctcccctgtatatgaaggtggaagcttgtgaaaaggtctgacatgggaagtgtatacaaggtctcattacaggctttgcaatggttttccctaacaggatattaaagccttcattattttaggacctctacaaagcaagttatgattagggcagggagcaggttaagagtaggtatagagcaaaatgatgtacctattgggaatgtgacctagattgctaaaaaagcaggtgtggttctttaagatcatccaaatatatatatatatatatttgctacatttctttgaggcctgctctcagttttcctaggcaacatttggatgatctgaaacactaaaccccagcaaactgtctaaaattctaattctacctctgctattcacaactagcgtgacactgcatctttgttgacataatttgaattacttgcagcttggttttctcatctgtaaaataagcaaagcaggttctactattttttaaagtacttctagcactgggaaatattttttttttccctgatgagttaatcaggctccaattgaacacaaagaggtctttctagagaaaggtcaagattat

SEQ ID NO: 481 - DNA, 324115 bp, Homo sapiens
  source 1..324115: mol_type = genomic DNA
tatgccacatcatctatataactatacacgtggtgacctatagttatgtgttgcttacccatgagaatgcattgagaaatgtgttgttaggtgatttcatcttttcttttttgagctggagtctcgctctgtcacccaggctggagtgcagtggtgcgatctaggctcactgcaacctccttctcctgggttcaagtgattctcctgcctcagcctcccgagtagctgggattacaggtgcccgccgccacgcctggctaagttttgtatttttagtagagacggggttttgccatgttggccaggctggtctcgaactcctgacctcagatgatccacctgccgcggcctcccaaagtgctgggattacaggtgtgagccactgcgcctggcctaggtgatttcatctttgtgtgaacatcatagagtgtacttacacaatcctagatggtgcagcccactacatgcctgggttataggtatggcctatggctcctaggctaccaaactgtacagcatgttactgtagacaactgtaacacaatggtatttgtgcatgtaaacatagaaaaggtacagcaaaatgctgctgtgatactctcatggggccactgtgatatatgcagtctgtccttgactgaagcatctgtacatggcccacgactgtacctatatatgtgccacgtcacctgtatgtagatatgtactctgcagacactcatgtgttgggtacacaaacaaggagcagattgataaattctctgagtttcaaaattgtgttgttttggcagctttgtgactttttcctttctcccaaatattaccattagcttaaatcacaaccactattgtttctatggggaaaacatacacatttgctctccctctcatatttggactactaggaaatgaaaaacttgataccttagcacccatgcaaaaaacctgtgtggcaattttaaattaaatatattcatactcagccaggcacggtggctcacgcctgtaatcccagcactctggtaggctgaggcaggtggatcgcctgaagtcagaaatttgagatcagcctggccaacgtggtgaaaccccgtatctactaaaaatacacacacacacaaaaattagctgggcgtggtggtgcatgcctgtgatcccagctgcttgggagtctgaggcagaagaatcgcttgaacccaggaggtggaggttgcagtgagcagagatcacgccactgcacttcagcctgggcgacagagcaagactctgtctcaaaaaaataaataaaataaaataaaataaaaataataaatacatatattcatacttaatagtggagagagagagtttatgaattaaaccctgactttttttcctgataccggaaaagagatgaaattcatgtacttctttatttggggagaaatagctaagtggaaaactgcatgtagaattttaatcgataggtgttgaaatataaggcattttaaataacttctttaacaaaatggtagatagtaggatctattttaatttttcaatctgaaaaaaaaaaacccaaaacaaaaaaaaaacaaactatcctcatatatatatatacagtgtcaacattttcagagcacttacattaggaaacattgtttctcttcaactgtatgacaatactgtatatgccacaataaaatttacaaaaacaatcgcatcagcagtcataacaaacatcatgattttacatttcaatacacaagaaaaaaaatagacatcttcccggcacttggctcccgcctgacggcaacgtctcctccacactttgagagacctcagcttttaaaacccagcagcggctatttcagaagtcatgtcctttccagatccaaacttaaataatgagaaatttgccatttcaaaataactgagagtttattcatggatgtggtgaagtttactccaccaaaagatgtgtaaaaaaattgcatgaaagtaaaaataaataaagctgttgtaaagcagcctcgttgacacggtagcccagaacaaaacacttacgtgtaaaagtgtcattacaattttaaagtaattatttatattcaaattacaactttttgacaaatctaaagaaaacaaactgatttggtaaaaggttcaaagacttccacattcaagctcggtgttgtttcacacgcgtgcgccccggctgcggcggtgacatattgctgtattcggacataaggcactgtgatctgaacataccgtgcactcaccttatgccacatcacctgttccataccagtgaattctttgaaatgaaaaataatgaaaacttcaggacacagtgcactttaatgacatacagcatttaaaatccttcagacaaaggtctgaaaacagtcttttaatgcaagcctgaatcttcaagcacataaaatctttcttttttaagcttaatttcaacatcactggaagaaatacctattgttaaaccctgatatacattcttaaccacttgcagccagtgttcatgaggcaaaacgtgacccagagactttgttcaagttctcctcctagggcgtctacattcacggcggtcactccgtttctgtctccttttgtttggcacctgtcagtggatggaagatgaaagtttcaaagctcatggtaacagcagggttctctaccccaggggtttctacctgtgtctggcagtgccttaggaggatgatccagaggcttcggaggagggcgatgtgggaaggagcaggtggcccaagctcccatctcccacccaatcgttcgggcagcttggatccacgtaacatcttgtcattctaaatatgtcagatttaacttggaaaacaaaaaaaaagaattccactcttaaaaaattttactaagaaatatgtaggtatgttttagtgaaggtgtgaagtatttcagttgtgcactcttacaaatatgtattaaaaaaaggtttaggccgggcgcggtggctcacatctgtaatcccagcactttgggaggccgaggcgggcggatcacctgagatcaggagttcaagaccagcctggccaacatggtgaaaccctgtctctactaaaaatacaaaaattagctgggcgtagtggcgggcgcctgtaatcccagctacttgggagactgaggcaggagaatcgcttgaatccgggaggtggaggttgcagtgagccgagagatcatgccattgcactccagcctggttgacaagagtgaaactccgtctcaaataaaaaaaaaaaaaacaaaaaaacaaaaaaaaaacctttataaatattctgaaggataattgcacctaacaagtatctggctaggacattccacagtggattggcagggagagctactatttttctcatcacaggagcttctctcctaatttttcaccagacgctagacccctgaaagagatcggcaatctattagagcgtgtggctgaaacaccgtagctcctggcatcagactgcccacacactggatgcacgcacacatgggttcatttggacagtctaagtttgacaatgaactgttgctaaaaacttttttgagaaagagaaagtgttattgtgttgaaccagtacccctctggggaacggtggccattgcccgatgaaaagaatcaccactagtaccttctaatcgagtaacagcagacacttcatcaaactgcctcttactgactattccatggacaaccacctaacagtgcaggtcccgggcactgcgcctcattgcacacacatggcttttgtgcacggctttcagctcttttcatagcaacataggagggagacgggcctgtatcagccggctccttctctactgaagaaattggggctgaaggaggtgaagcgacttgcttacattcagacagcgctcgggtgggacagctgggacttggcctcacggtgggggcctcctcacttgcgattgttgatcagatgcaggcgctccctgagttccactccaaaagttcacttgtaatccagttattagtaacacggaatgttttcctcaacaaatcgtgttgtatacactgtatcataaggaattccaacccagctacccccatcttcacggcacaatttctatggtaacatacattccaaattccagctggaaatagattcctctctgcaccagcagtgatgggaggggcattgcaatgacttagaatttttgaaataccaaatctggatggaaatttgaactcatccagcacaaccgttcattcttatggtttgagatatcaagaaacagagaggatgaatcgcttgacttgtttactctttttgtaatgcccaaagagacagacaagagctgacattcagcctgacccgctgggcagactgtgtcccgtggtccagggctggaaacggggcatctttttctgaaggtgccaagctatatacctgtggggataaatctgcccagagaagaggccttttctagttagcacaaatgtgctgtgcagttatgcctgcctggaaatttatatgaatttaatgatggtctggatgagcctggctccctctgttcaatgttgcctgtgagattcctccactgttgaatgcagctgtactgttcgttttcaatcctgtatcgtattccatcgaatgaatgtgacacaatttatccattcttcttttcaaagatatttggattattcccagttttatggcattaacattcgtttagttcttaatgtttcatgattatagagactattgtgagattcaggtcttttaaacacttgaagtttgcaagtgactgcaccaggccccatttctagagtttctgattcagtggatatgggacggggccccaacatgaacatttcattttctagtaaattccaggtggtggtgatgatgcctggcctgaggaccacctcggaaaaatcactgctgtactggaatttctcttggtgttctcatttagcgaataagacatgtttcttgcaggtggtgaagattcctttagggtaggtatttttgggttacagacttaattgtaaaaactagtcttaactgaaatttctgaactaaagagaaatcaatactgtagcacacacaccgtttaatattggattctgagagttcaaagggcatgctgtttgctcccacatcgggtccatgtggccctgacaaaggctgggttgttcatatttgactggggctggggaggtggagggatgggaagaggaggagggaagggagggctggcagttttaagaactctcaagcccacctcttactactgagtgtgtgaaatgagaggaaggccagctcctcttgtctaaagccctctcccgttctctctgctcctcactgtctgagactctgaaggcttgctcaaagtgaatctgtcaaaaaatgagtttaaccacactctatctgaaagtgaatgtgatttctgtacaatattaatgaataaaagtttgtgtttaggtattctgttttatctactcaaaatataagttttttttctctttaaggaaagatgaaggtatcaaatagaagccagtgacgttccctctatgtttctggtcactagttctctcacaaagcacaattgaagaggtcttttcagtggaaaaggttatgatgaacatggcaatggctcccaagtcatttagggggccactggaccttgataggatgctcttaacttcgaatacgttctatacactttcctcactcacgcagaacacttaaacttcccaactgaagagaaaacgaaaatggtttcaaagtaatatactcaaagccttgatctgtaggtgggtggagaaatgatggtttaaatgctgcacttcctgttctacctcccacccttcctagacgccgatggcaaaggtcagaaaccagcattttacctgctggtgtgaggatcagggcttgcagaatgtccgacagggaaataatacccacaatactatctgcttcatttaccaccaccagccgatggacctgcaaagagaaaagcaggacacgtgaaaattaacatttaaaaaaggtttaaaatggacatgagaaataatgtcctgtcatgtttttatatgatcaacacatccctccagcctggggaatagcagtgagacatcatctctacaaaaacattagacagtggctgggtgtgctggtgtgcacctgtggtcccagttacttggtgggaggattgcttgagcctgggaagtggaggttgcagtgggccaagatcgcaccagtgcactctagcttgggtgacagagtgagatcctgtctcagaaaaagaaaaaagcaacacacacacacacatcccataaatgaataaatgagggaaagtagccacagacagacccatacgatgaccttaggctctaatgttcaatgtgttactgtctgattacctggaagacctactccgtattaaaaagtcacagccctggtgaaaaacagggacacaggcatgagaaggaaagaggggaaagctatctatctcctgtctctaatgatactgatttgtctctaattcaagctgatttgcttgcttacttttaagaaaaatgagctagctatgccctgctgagttttcaattttcaaaatattaatatagaaaagatacaactcaaacacgaaacacaacgtagctatcatacattgttaaacataactgttttaatttctaaaagttgtatatcagtttctaataactatcaggtacttgtcttattaatacatgggagagaagtccagatgatgacagaaacgaagaaacaaggtcgcagctcttacaagggttttattttctgcagtgtcttttctctgtgaagttcatatattaagaatcgcatccaagaggataaatgagctataatgaagtgggatagactacgtccatctctagttttctactctgaaatctctgatgagtgacggcagagcgttttgaggtgtttctgtaacaggcctttcacccgcaggaagggagcggcgttgctattctcttaaaagcttcatgatggccgggcgcgatggctcacgcctgtaatcccagcactttgggaggccgaggcgggcggatcacctgaggtcaggagttcaagaccagcctgaccaatatggtgaaaccctgtctctactaaaaatacaaaaattagccagaagtgctggtgggcacctgtagtcccagctactcaggaggctgagacaggagaattgcttgaacctgggaggtggaggttgcagtgagctgagatcgtgccactgcactccagcctgggcgacagagcgagactgtgtcttaaaaaaaaaaaaaaaaaggctttggaacctggagccgggtgcggtggctcacgcctgtaatcccagcactttgggaggctgaggtgggcggatcacaagatcaagtgctcgagaccagcctgaccaacatggtgaaaccccgtctctaccaaaaccacaaaaattagctgggcgtggtggtgcattcctgtaatcccagctactcaggaggctgaagcaggagaatcgcttgaacctgggaggcggaggttgtagtgagctgagattgcgccactgcactccagcctgggcgacagagtgagactttgtctcaaaaaaaaaaaaaaaaaaaaaaaaaaaaaggcttcagaacctgggccacggcagctctgtgccggctgcgccctgggagaccctctctgtattgaacagtgatacccctgatagaaaacagggacataggaaggagataggaagagggggaaatccagtttttgtattttgtctcaaataatactgtttgggtgatgtttctgtcataggttgctttaggttaataataataataataataatggcttggtcatctttcccgtggcagtcaacataaatttcttttaaatgtttctctaaaaaagctttcaggttcatcagtaatcctgtgatataacacagcacaattatttgctaactataatcacacattaaaatgatagttcacatttgtcttctacactgaagacattttattggttacattcaatagtggatattagccgggtgcggtggctcatgcctgtaatcccagcactttgggaggccgaggcgggcagatcacgaggtcaggagatcgagaccatcctggctgacaaggtgaaaccccgtctctactaaaaatacaaaaaattaggcgggcgcctgtagtcccagctactcgggaggctgaggcaggagaatcgcttgaacctgggaggcggagcttgcagtgagccgagatcacgccactgcactccagcctcggcgacagagcaagactccgtctcaaaaaaaaaaaaaaaaaatagtggatattaaacagatatcttttgaactctgaaggctaagggaaaccatctcatccagagaattaagcagttctctcagactgaaatgactccccacgtattttcttgtcatctgctgctgagtcaaacttatgtatgtcctttgttggaggtacctaaaagttagtgttctatttatgtcatataaacaaatggaatcatcactgatactgtacacccttctcctagctacattaaagctaaaaactgttatttttttggtccttctgtgaggagtcatcttgtgaaggaattttctttttaggcggagtcttttatttagggtgttacacaaagtacatttgaaaatcttataagcagtaaagtctaaggaaattggactgctgaggtgcaggaaactgggagttactagattatttgctatttatctaattgaggaaagagagatactggtgggaagagagaaaaaagttttactgacttatcattcactttgttaaaatatatattacgcactttaaattttgaattcataaatattcaaatggaacttaaagcttctgggatttttgttttctcaaaacaaaatgtatccatagatacagatacatcgatctatttagagacagggtcttgctctgctgtcgagactggagtgcagtggcaccgccacagctcactgaaatatcaagctcttggattcaagggatcctccttcctcagcttccctattagctatgactacaggtccaagccaccatgcccagctaatttatttttatttttagtagagacaaggtcttattatgtcgtccacactgtcaaacatatatagtttaaactatgaatgtatcttaccagtttattggattcacctatgataccaggacttttccattcaattcaattcaacaaacttttagagatcgcctatatgccaagtagtgtgccaggttctgggacaggagggaatcccatcgactgaacctggaggctgcctcgctgggcccttcctgagattcaggcttccagaggcatcattcactactggggacttgttgcagtggacgtcgggggagcaggactgggaaagccgtctcacctcagctcttactattctgtccacgatggtctccagtatttccagcttattgcacttcacaacaccttcaaaatactgtgaacggtgctgaagggcctgggtcaccgtgatatctaggttattgtatgttttctcagcagcaagattctgtaatgaagcaagagaataaattatatcctttcatttcagttcacttcaatgaccaaaattagtgagcttaagagagcctgatttctaaaaactttaatgcttatctgaatttagtacctgcatacatcagacgttctttctggcttacgacatgccattgctactgttattttgtcaacatatcaatcacaattaaagataaccatgttacaaggtctaccttccttacgaagcaacattgttaaactttgacagtatatcctgccaaagactgccccccaatttttaccctctaatgctctctaccatgcatggatgaaatctctggcaaggtgggctgacatctgtaaagggtggtgagtgccacagggctagaaatgctgcagcaacggaccttctcaacaagctccctggggaacaaggtttctgctgggaaggctttgggggacccatggggatcaagcaaccagaggaagaacaggcttgaggagccccatggatccaaatggcttcatggggctctcattcattttagcgggtcccactcaaccaaaatgccgatcagcatatttctcggtgactgttatgtttaacataatagtgtgaagcaaagggtttgaggcagctgcagaagaatgtttaatgtggggtcagtattgtggcaaaaaatggcgtgcacatttggggctataaagtgtcagtccccttttcttctttagaacagtggctcccaatcactaagcaatgggatgcgcccgacaaaggagccatgagtccacgtgtgcactgcgcacgcgtctagaggcgaataaatcaggcctcctacgtggaaacaagaacatttaaaatatatacacatgctgtggcagtgcataaaatatgcatgtattgtaaagatgaaaaattataaaatgctactaatatataattggttgctaaaccaatgcagattaaaagtacaattactatagaaggtctataaaattctgataatatcctcacaccccaaaaggttagaaattattaaattaagaaacaagataaaaacataaaaacacattacatgaatgtttaaaatgcattctaggtgacagattgaacaaaattaaaatacttacaattacatcaaatttggaataaatatctacaacttttcctaaaaatgaaaaatatatgttagaaaaatgtcttaagggacaaaaagaaattcatttaaaatcagttttaatgacataattactaaaagttaaacactgataaataaccttgtctattttaaatgaaaacttagatatgaaatcatattttaatggacatatgaaaataaaccaattaaactttttttacgatcctgcgtgccccttggtgctgaatttattcaccatacccaagttttcattttccccacgtatctcctgtgccaggtcatcttacaataattgcaccctgagataaacaattatttctgcctgtcagcgccaaacacacaaacctgactcatccacaacaggcagagctgatattcgtctttccacaaatatgttcaaggctttgatgatgggagtgtctggatgtatgaaggcaatgttgtggtacgttcctattccaagctcatccaggttctgcttcatgaaggcaggctttggcatatcagacatctaaacggaagataaacgcaaacgttctagacccagaacacactcttgtcatgttcaaaggtccagatttgaatgaaaaagtatgtccaacaaattaaagttagttttttctaacagtctacctggatgcctgaattaacatgagaaaattacaaaggactgtatcttttgtttgaaccagtttgtaggtctatgcttctatttaactattcacaaactattgcagagcattgatactgtaatctttttccatctcctcttcactcactaagaacgcgtatagaaccagggaagaacaggtctatttgggatattaagacctgtaagccacgaagaattgaatcctttattcttaattgttcatgttaaattcctggtcctgctgtcaggattaagtaatatttattaagaacctatacatttccaaacccaaagcatttgacggcagctgtctgagccactgctaagctagtcctcacgccacccgcctctacatcctgaattctccttggagagctccaatttttgtctactaggaacaaagaagccagctgaacagaattaaaagaatctttaaaaattaacttttcatgggctgttttaaaggaggagggatatggcaggagagaaaagtctaggatcatgtttgagtataacaaaataaggtctacggtttcaaaaatccaccttttataaagggtatagttgattccatcctcctggtgtaccttataattatcaggaaaagatgaacaattagaagaaacaaaatgttcaagtcaaagagttcatcaatattcaaatcatgagactcctagaaatttagagaaaaaaaaaaagaaagccctattaggtcatctagtccatctcaacatagcgaattccctgttgcacactataggcttaggctaattttcaaacgtcttgaagggtaatgctccttttttctcagaaaatgatctcataattcagtaaaaatcaggctctgaaatgtctttaagttctatatttttaactgaaaacctttagttagctgaatattctggtagcatgattctaattaccatattggcccaaatatgaggcagtactgggcagaggcaacttcctctcctttttatagaagataaaaatctgaagcagctctgcaaaagaatgatctcacgcttttactccctcttgtgcaacagcacactagcagaaatagtttgggcttgggagtcagagagactcccgggtttgcaatctaccacttagtatccacatgactgggggcacgtttcccagccaggtgtcctgtgtatgcaaggtatgcaaacgcctccctcccaaggcccctgcgtggagaaaagcatggggagtgaggaacgcttgaaagggatcctggctctaccgcttcccagccacgcaaccttggcaaagctacttaacctttcttagctgcatccctataaaataggattaataaaaatacctacctgatagggtagcagcgaggatgagattatgtcaagtgcttagaacagtgccggacatacagtaatcagctctcatgattaatattatttaaaaatgatgactctaaggattaagtgagctgcaggcctggcacgtgggggccctgaatacatccttcccaccccatgctccctctgttcctattaaacttcaactactaaagcggctgcattcccagatgtccagtctgataaacaatgcggatgcatccctaatccctttttcctagattatcgcctttattaaacttcagacttgagtttttttgtaaattactcttccctaccttctttcttagcacagcatggttaaataaatgttatttatatatgtaaatgattaaaatacaagactgggttgattgacaaggtatttctctccatcactaagccctctgtgcttctgtcagcaaaaggggtccctcaagctgcctccagggcaggagcttcagctccttcacactgcaccggaacgctatgttaggtccttaggtgaagccatggggaggaaaatgggaaagctaatttgaagtacatttttaatatctgttacagtcttggaaaaacaactcttcaaagtacctcttcagaacgattaagaccttctactggttctatttgactgattacttacaacctcaaattccatgcatgtaattaaaagacaaacataaaaagcctcttataaactctctgttcttcctgagtctcttttaatgtttccaaccaaacaggctcaaagttctggatgactacggagccaggtcatttcaagtagctgagaaaacctacaggttaatacaggccttatttggaccaacatggtattctcttgccaaaattttatttgcttcgggtttttctatcactgctgcagtttataagataatcttgaggaaagcattttttggaacatgtttctaaaaccatgacaccagtaaaagcaacataaagcaatttttgctctagatattagttcagtttatcttgtacaacagtcctcaattagacttgcagattgccttatttcccctcatatgctggtgacaaatgttttaatttaaagagagaatgccgagttttgttgttaaaattgttttgatacttgcactaaaaggtgattcttttaaattggaatcaactttaagaatgtacaattcagagagtagtaagttgagaaactgaagtttagaaagggagacctcaaaactaacaatttcttctactgagggtaacaggagccaatttacttgaagtacattatttaataagtaaatgcaattatgtctttagaaacgctaaaaactacttacaaaaagctggaggaacttgaggattcttttgtgggtaagtatataaagtgcattcccactgatagggtcaataacgggcaatctgtggattttatttttgatcaaggagtatacagcatcgaagaggctgtgggagaagtcattaaagttgttaggaggctttcgagaaaaatcagaacactttggactacccctgccttaaagcacttccagtgtttttattattgcaataataacagtgttttggaagagttttaaattagagatctcagcaaatttttcatttttcacaatctatgttaacatatctcaaatacaagtgcaagctacaaatctctagaagaggagattttttttggtttgtttttttgagacagggtcttgctctgttgcctgccgtcatggctcactgcagccttgacctcccgggctcaggtgatcctcccacctcagcctatttgagtagctgggactacaggcatgcgccacctttcttttttgtagacatggggttttgccacgttgcccaggctgctctcgaactcctgagcttaagcgatccacccaccatggcctcccatagtgctgggattacgggcatgagcccttgcgcccagccaggaagaggagtttttttaaagagtgtatttagtgattttatttgaaagacgatgaaacctaaatccttagaaaagcaaacagatacatcgtattggcaagagagcaaaggctgtagcagcaagctctctgcattggtgagtgggcaaactggctctaccccgggccggcccggctaggagatattgcagggccaacatttctgttctacttggtccctctcctgggactgccagtaagaaggttgttatacctttttgttaggacttggaaataaaatgaaaataaatattttaatctttctctgtactggatttgagtttgaaagatgcttttacaccaatatggaaatgtatcacagccaaaccagaaggcttggataaaaaaggacgggccagacgactacacagaaggcagcccatgctctcaccacatctgaaccgacatctaacacacactgatgtttaaacgctagtgtggagcagaattgccaagggagttgtttaaatgtgtattcctgggccctatcctgatttagcaggtcaggggtaaaagcccaggaatctgcaatttcaacacgccccccagattggccgagatcttcgtgatggtttagtatgaccctattactagaccattatccatccttagcaccagcaacggctgtgatttttgtagtgttcctagatttactgaatgcgtacagtgtagctggaattaaggaggcaggccctgtttggaatgaagaacatgtttatttgtgtctttctttctatcatggtgataaaacacatacatctgaatgaatgttttcaaagaaaaaaaaaacaagtttaccttgcatctggagatatattcactaaaggcttaaatgtttcttgtaaataaagctctgtatttatagaaagaaaatatgcagttagtaacacatttgctgtttgcagttataacacaaattcaaatacccttcagtttacggttaatagttagaaggattaaaaactcaaataaaaagaaatttaatttgcctaaaactcctgtgttaatcatagttatggctattttaaacaacttccaaactgttttcaggatgttgcatttgaagaaaaattaaatattaaaaaacaatgtgacagtaagtgtttataaaatcaggaaaaacaaagaaatctgataaaagagcaataccagcagaggtcactagaatgctaccaggttcaccttactctcaagaaatgaagcaattatgaaatttaaaaaatcaatttccataagttataagataaaatcagttatgacaaactttgttctttaaatatttttaagtattattttaccaaattgatgctcaaaacctactgcattgtgggcatctttccagcacataaaaactgtttttttctgaagatatcaactgcaattaatttgcttttccaaggtttctttttttttctgagacagtctcactctgtcactcaggctggagtgcagtggcatgatctgggttcactgcaatctctgcctcccaggtacaagcaattctcccacctcagcctcccaaatagctgggactaaaggtgcacgtcaccacaccctgctaattttttttgtatttttagtagagatggggtttcatgatgttggccaggctggtctcgcactcctgacctcaagtgatccacctacttcagcctcccaaagtgctgggattacaggcatgaggtcctgtgcccagcctaattttttttttttttttgagaaggagttttgctctgttgcccaggctggagtacagcagcatcatcttggctcactgcaacctctgcctcccaggcccaggcgagtctcctgcctcagcctcccgagtagctgggagtacaggtgcgcaccaccacgcctggctacttttttgtatttttagtagagacagggtttcaccatgttggctaggctggtctcgaactcctgacctcaggtgatccacccgcctcggcttcccaaagtgctgggattataggcgtgagctactgcgcctggctctaattttgtatttttagtagagagagggtttcaccatgttggtcaggctggtcttgaactcctgatctcaagtgatccacctgctttggcctcccaaagtgctgggattacaggtgtgagccaccgcacctggccttgctttaccaaagtttctatacagaaggcgtttaagaatattttggcattattattactacaaaatatcatgtaatgtcaaaacgtaaacatacttaaaccttggtctatcagtacttgtacagtagaactggacaagaagctggtgttacacaatcactgcacaacagactgtacagatcccatgccaaatttgtttagcttggtttgacaaagccgtaataaaccaaacccatcactcagtgaaacttctaaatcgtatggatttgaaagggcccctgggggtgtaagagaactccaagatgtattctgatttcacagccagctacaaaggttgcttctcctatcaagcatattatgggaaacacagaaccaaactcttcaattttgaattcaaaattttccttcagttggtccctccatttctaccagtgtttccttgagcaccctccaaaggctccgctgttgcagacagactgggtctgccgtgattcccacccccggtcctctccaccaacccaccatgacaagtgtcagtgagaccaccaccttacaatcatgaaatgcgaatttaagaaatggttctatggcagaaaagagtatcatgattttacagggtgaatgtcaatgtgacaatgaagagaatatggtcttcaaattacttccatgctatttgctccaaaccatctagtttgaggttcatttgtcctaagtttctccacaatttgtaaagaaacaattactaggtttaaataagaacagatgcttgctttggttcaagttaggcatgcctctgatgcatttcttaataccaaggcaaatctctgagggcttagacttagtagtgagcggtggccccattgtgggcagcgaggtggggcttggttagctcattcatcttcacattcctggccctaggataaggccttgcctgctgaaggtgtcctatacatgtctataaacagaagggacaatacttatattgttcagctttagtacagtagcatactatcaaaattaacagaaataaagagaatgttttatataacattttatggagcagagagaaaaggatctgcaaaatgaaaacatacttttcatactaaacatagctttcccgatactaaaagattttaaacatccaatagtgcttacccctccatgtttcaattttatgttcctctaattcataaatctgtacctgcaaataaaaaaattcttatttataaatatacatatacaacatagaaaaaatatttggaaaatgaaacaaaacatagcttggataatagcattttctattcgcaattagaaaatgaggcggccaggtgcggttgctcatgcctgtaatctcagcactttgggagatcaaggtgggcagatcacctgaggtcaggagtttgagaccagcctggccaacatggtgagacctcatctgtactaaaaatacaaaaattagccaggcatattggtgggtgcctgtagtcccagctactcaggaggctgaggcaggagaattgcttgaacccaggaagcagaggttgcagtgagccgagatggtaccactgcattccagcctgggcaacagagtgagactctgtctcaaaaaaaagaaagtgaggtgagatatagagaaaaaaatgtatctcaagtttttttttttttttgagacaaggtctcattctgtcatccgggctggagtgcacaagtgcgatcatgactcactgcagcctcaacctcccaggcttaagtaatcctctcaactcagcctctgagtaacttggactacagatgtacaccaccatgcctggctaatttttgtgggttttttttttttttttttttttttttttgtagagatggggtttcaccatgttgccccactggtctcaaactcctgggctcaagtgatccacccttctcagcttcccaaagtgctgggactacaggcgtgagccactgtgcctggcctgtatctacagatattaagaaaaactttgggctgcatatttagacataactgcttttttgcaattttgatttcatattctactgctaagatttcttatatgggatttgctgcatttcacagaaatctatctattcaaaaatcacactcatgctgattttgctagttcaaaagcagagatatgaccactataaggaaagcccgtgttcacttgcattggtaatattgaagaaataatacacttcatgggaaataaatacaggatatttacaaaatctttggtaaaacttcctaagagtatggttgtgtttgtttttcggagacagagtctccctctgtcgcccaggctggagtgcaatggcgcgatctcggctcactgcaacctccgcctcctgggttcaagcgattcttgtgcctcagcctcctgagtagctgggattacagatgcccgctgccacacccagctaatttttgtatttttagtagagacagggtttcactatgttggccaggctggtctccaactcctgacctcaagtgatccacttacttcggcttcccaaagtgctgggattacaggcgtgagccactgtgcccggcaagagcatgttttatgaagaaactcatttttgtatttgatgtaagaattattggataatactgagcattacgcataaagcagtattaattgaattaacctacaccttttaagtaccccaaataggactagttaaataagagtatgcaatcctgtccttccccccaccctcatgaacaaacaaacagaaactaaaaacacaaaaccaagcaggttgaatctcagatatcacaaagttagatgaaggacaaaagtggtttttaagctacgctctttccagaaccattgtactagggaccagagagttctgctactaaaatcagccaggagctgtctcttcctaattagcaggaacatgtcaaaacggaatttatttcactttaatgactcatttttttctgctttaaaatcacaaagtacatataattcttgttctgcaattgctggggtaactgaattaagctctaccacctcaacaggcccgcagagataagcaaaacttacagaacgtctagctaataaatatgtagaattctgctaagccaaggaattccgaaagctgaataaagaatctatttccttttatttttcctgagaattccttctttgagtttcatacatataacttacagtaaagagagttttgtactgaagttccctgcatgttatatagatttggaaaatcaccatcagcacaccataccaaaaaagaaaaaactgaaaacattaaaaatcttaaaatacacacatatacctacacacatacatagatacgtacagctccaactactgacataggaactggtgccacttaccataggtgatttatagtatctatgtagtatatttatgaaatctgtaattgttagcattcctggaacaaagaattacatgttacaaataaaaccatgaaaacatttttaaaaatttcaaatgacaagtgagcctagaatatatgctagaagagcttataaaatatacttcgaagatatcaagcagagtttaatatattatttaaaactattgatgtgttaattgtgtataccaaactggatatacaaatttagctgaaattaaacctgacagtaagtactacggaactaaccagagaatttggcaaatcaatgagagaaaactcattaattgatacaaatttgaaaaaagaattgcagttacaggtaaataattttaagtactttaagataaagtattccgtaagctttagaaacgtgacaattctgggcacttggattgtttcccaagaagcattctaaacacaatggttttaacagttgccatttattgagtgcttttgacgtgctagacaccaggatgatacggatgaaaaagacatgaacttcttccctgatgaaattaaaacctagaagcagacataacgatcatttcaaaataacgtgaagaatactaagagagacaatggcattgtctgctgtgattcataagataagtaacgatggcatttagatagctgtaagttacacaacagttttaacagtataacaatggtctggcagagacatcagtcatgtttacagcatctaatttgccctgtcaaaaaggtgtgcactagcgagatgagtgcggggcccagggatgccatatgccatgtgtggcccaaagtggggcagctggctcacatctgactgtggtgtcctacgtggggtttgttcattgggctggtaaagacacataagctcttcagagagccaaaaagttgctaaattaaaagaaattcaacaacaacaacaacaaaagctccataaaagttacaacagtgtgtagagttctcaatgaggcggcaaaaaaaaaaaaaaaaagaaaaaaaggacaacagtgtttggaccttactagcacgtccaccttcttacccagtatgtaaaagcaaggaattttttttttttttttgacagggtctcgctctgtcacccaggctggagtacagtgcagcgatcatggccttgacctcctgggctcaagtgatcctcccacctcagcctcctgagtagctaatttttgcatgtttttgtagagatgaggtcttgctatgttgcccaggctggcctcgaactgctgggctcaagcgatctccctgccttggcctcccaaagtgctgagattacgggcatgggccactgcaccctgccagcaagaatgttctttaacttggaaacatgtttactaggttgaattccaaaccggcatctattaaaatactttaggctttctgctttcaaggtttccattttcgattttcctcaggcccacactgcttacctacaaaactttgttttttactctcccacagtggcgctgctcggacaccgttggctaccaaagcaaagaaggcctttttaacctgaagaaaaagaggagaaacaaaacatactttcaaagtccaggaagaaaaataccttttttttttgagacaaggtttcactctgttgcccaggctggagtgcagtggcaccatcttggctcacagcaacctctgcttcctgggctcaattgattctctcacctcagcctcccgagtagctgggatgacaggcatgtgccaccatgcccggctaatttttgtatttttggtagaaacagggtttcaccatgttggctaagctcgtctcgaactcctgacctcaagtgatccatccacctcggcctcccaaagtgttgggattacaggcgtgagccaccgcacctggccagaaaaatacccttaacatatttgaccaagtcttatcagttatcttccataataagtttcgtaagtttgataagctaaaaataatggaatttattaacattagcaaaaatctttttgaattacacctaaaggcatacagggattagaaattattttttgaaattgaaataatgcaattaacttcttttttttttcttattgtatctgaagactcttgtctacatacatactttatgtaattaaaaccatacaaaagaattaaacttcagggtctaatatctcctacatgtggttattaattcatctgaaaacactgaagttgtatcaaattacctgaaataaaaatttatttttagtattttcaatgagaaaacaagcatactttctcagttcccaaggttgaggaaaaaaaaaggtatgaaagatacaatatatttttgcattttataccttccagacacaaatgggtcaggcactaacatatcatatctcacttaacactcataacaaatatcttttgggataccataaggtatcatacttgaagatttattaataaccaaaagttcagtgctgaaaatgatcctctaaattcagacagcaaataagtacagggaaaatgtccaaccttattaataacccaagaaatgcaaattaaaacaaagtgtcatttgtagatgctaaataagccgatattttaaagttgcagctcctaatacaagggctattataaaaccactggtggcaccaaacactgagaaaatattttttctaacacagctagtgtcaagaatcacaaagtattcatattgcttgtgcaacagctttttctctttgaattattttaggagtgggattcctgaatcaacaatgttccatgtgacattacttctaatcttgaaaactgaaaaaaaaatccacctctcaaacaaaacttatcaaatactagcataccaatgagaaaaaaaatcaaataataattaacataattatgatgttttcataactatatcaagaaaggtctatgacaataaaaatgtaactgtaaaattatacattatgatacttagaaaaatatgtgtttaaatggaaacaatgagaaacaagcaaaaaaagattaaactgatacattaagaagctgggatagtaaaatgtttctttaaaaaaagtgttacattatggtatggttatgtttttttttttttaactaaaagtaaattattctcttctcactcactactcaaaaaaaaaccttgttggctgggcacagtggcccacgcctgtaatcctagcactctgggaggccccccgagatgggcagatcacctgaggccaggaattcgagaccagcctggctaacatggtaaaacctcgtctccactaaaaatacaaaaattagctgggcatggtggcgcacacctgtaatcccagctactcaggaggctgaggcacaagaatcgcttgaacctgggaagtggaggctgtagtgagccgagaacacgccactgtactccagcctgagtgaagagtgagactctgtctcaaacaagcaaacaaacaaatgaacaaacaaaacaaacaaaatccttgttaacttactaatgaaaacaactgcaggaacctagagcagatgactttaggactaataacttagtacctatttcttcctttattgtgatatattttgccttatgtggaactgctcatgcatgtacctagttcacctacacaagaatatagggactactggtgcgttgagggagctcatcaattatttcacgcatttattttaacccgtccagcgctgagtcctgaatatagcagggattctagacattagtcaaatgactacaagagaatgacgatgaggaaatgagtagagccaacccagtgatgtgggagagcaacagtaactgagcagcatccagaaactcatgaactgtttctgaaacacacctttatcaaaaaggcaccaaaatacactgcttttgtaactaaatggcatccaggaaaggtgtgcccatttgaatggtttgctatttgtaccctgggcatctctgattgtggtcctagaatatattatagaagaatatagtggaaaagtcgcatgtaaatagattttaaaacacactgaatatctggtaagtttgcttttctaaactggttggaatagaatgggaatgggggcaccttttatgttttatttgtatttatttattttttttggagacagggtctcactttttcacccaggctgaagtatagtggtaccttggctcattgtttcctcactgcacccctccccgctgcccctgccgggctcaagtgattctcccacctcagccttccaagtagctgggaccacaggcacatgccaccatgtccagataattttttttcttgtagaggcaggatcttgctatgttgcccagactggtctcaaactcctgggcttaagtgatcctcctgtcttggcctcccaaagtgttaggattacaggcatgagccactgcacctggccaggggcatcttttaaaagcacaaattgcttactgttttcttcaaaatgacagatttagcagagaaaataaatgttaaaaacattcatgaggatcattcatgaaaccctaagtagccatagctattgaaaacctatgccagaaagttctgagtttggcataatgaaacagttgaaaacaactatccaagttgtacaaaagacaggaaacactatttgagggccctggagtgcatcaacacggggtggattctgggagctacaattcttgaaagaaaagaaggctatgcattgagcatcacattcattctggaatttttctgagggcatttcccacatcatctgcacataggtcaatttcaacaagaagctgaaatttatcaagaagaatcaaacaaatcccaggtaagataaacacaaagaaaaccacacctaagcacgtcatagacaagatgctaaaaaccaaaggtaaagggaaaatcagctagagggggaaaagacacattggctttcaaaagggtaacaagcaggctgacggctgactttccagcagaaactatgaaagtcagaagacaagagaaagaaaactttaagatgctaaaataaaaaacctgccaatctaggttagagcatatatccagtgaagatatccttcaaaaaggattggcaaagtaaggttttttggattaaaaaagcagagaaaattgtcaccaaccaaccagcattaagaaatacttaagggaggccaggtgcactggctcatgcctgtaatcccagcactttgggaggccaaggtggggggatcacttgaggtcaggagttcaagaccagcctggccaacgtgatgaaaaaaccccatctctaccaaaaatacaaaaattagtcgggtgtggtggtgcgcacctgtgatcccagctacttgggaggctgaggcaggagaatcacttgaacccaggaggtggaggttgcaatgagctgagaccatgccactgtactccagcctgggtgacagagtgagactccatctcaaaaaaaataaaaaatacttaaggagtcctctgcactgaaggaaagattctagacctgcacagaaccgtaggagggaacaaagagcacaggagagggcagagatgtaggtgaacataaatcaatactgcataaagccagagtaatgatatcctgtgggattcataacttatatagaagcaaaatatataacaatagcacatagggtaggagacggtttaacttttgtatacattttttgcattgtttgggacttggtaaaattattattaaaagatggaaagtagtaagtcaaagatgctatgtaatctgtaagacagcctctgaaagatcaacaaaagaatgtataactaagttcacatgttctcatccatttgtgggagctaaaaatgaaaacaactgaactcatggaaatagagagtagaatgatggttaccagaggctgggaagggagggtagtgggggtgggtgcggggaggaagtaggggcagttcatggataaaaaaatgtagttagatagaatgaatacggtctagtatttgatggcacagcagggtgactacagtcaacaataatttattgtacatttaaaaataaccaataattgggatgtatgtaatgtaaagaaatcataaatgcttgaggttatggacaccccatttatcctgatgtgattatacaatgtatgcctgtatcaaaatatttcatgcaccctataagtatatacacatactatgtacccataaaaatgaaaaaagaatgtataactaaaaagctagcagaggagaaaaatgggttaaacatagtttgttaaatcgagtgaagaaggaataaaagaacaaatcaatagaaaaagtgaaaaacgcatagcaaaatggtagacaaacctaactatagcagtaactgcatgaaatgaaaatggactaaacggtaattaaatgctattctaggcatttattgcatggtttaattgcaattgtcaatacagaaagtaaacgaaccttgtctatgacctaagtcctaggatcctatcaaggactgcctttctctaataagggccaatgagtccaatggatctaaaccatagatgagaccacgtgagagccaaacaagagggcttccttcagtggacacatttctagaagcttctggcagagactattgtatccagcttcaagacataaatgactgagcacagtggacatctacacacaaaaatctctggtcaaatagtgtaataatttaaaaaaacccaagaataaatattgctattagcttagtttgtgaatattttgatattttgatatttaatgtttacaccttgtacaaatgatcacatatagatccaacagatttaatggacatttttacactacagtgagcctcatcacacctcaggcttaaaagaatgataccaacaaaagcaggggtttaagtttaacactcaaatatgatgattattacttcagactcagaaaaaaacatcctgcttccccataataaattctcagactaatctgctacaaaagcgttcagcccccaaaatgctgcagatactgtttacggtgaggccactgtgaacaacacaaacaggaaataactgcctaacaccaattcttaaggtggcaaatacatgtatgggaaagtatacggggtaataatacagacgttagaaactgatcacgcgtgctgaatcaagttaattctgagatgaaagacactgatgctgcgtggtcaatggcagggagggatggagggaggaattaattaatttcagacagtatcggtccaacagagggatcgatgtatgtatgtacgtatgaatgacagggtctcgctctgttgcccaggctggagtgcagtggcaggaacatggctcactgcagtctcaacctcctgggttcaagtgattctcccacctcagcctcctgagtagctgggaccacaggtgcacaccaccacagctagctttttattttgttattttttgtagagacagggtccggttatgttgcccatgctggtttgaactcctgaactcaagtgatcctcctgcctctgcctcccaaagtgctgggattccaggggtaagccacctcccccagcccaatggcaaggtttatagagagaaaagccccagtgaagcagcagttcaatggcaaagagaacgttaagaatttaacgtgcaaagtggtatctcttctgcaacagaagataaaacaaccaaggctcacggaagcacgtggagtgaattaagaggccatcccacttcttgtcaacgagctaaggtgctacacctactggacttcaacttctcgttttccacataaaatgtgtatctctacagaacagggacactgcttcatttctcaaactgaaatcataagcacagcagctcacttcgtttttctgatggcctcaagcaccaaggctttctcgcgggctccttggcccgtgccagctgtgtggtggctgctcagtcacttaaccctctgtgagcctcaacatgctgttataaaatggggctaatggatatttcctcacaggtgtagggtgtggattgaataggctagtatttgaagatgttcagtatggtgctcagcactaacagccaagaagaacaaatgcttaaaatttccagtctatactgaccaaaccagaagccaacagaaatttcttctttttttcactttggagacagggtcttactctgttgcccaggctcaagtatagtggtatgatcacggctcactgcagcctcaacctcgtaggctcaagtgatccttatgcctcagcctcctgagtagctgggatcacaggcatatgccaccatgctcagctaatttttaaatctttttgtagagatggggttttgccatgttgcccgggctggtctcaaactctaggcctcaagtgatcctcctgcttcagcctcccaaagtgctgggatgaaagatttattcttttaatttcatccacatacactgttgacctgtccgcaggtcactgaggaagtctcaattccatccttcagagatctcatataatattccaaacggacatgatactcgtacaatgcattaaagagcagtgtcctgggtgagctcgggaggggcctgacgcttctgtggttttgccgaccttctttgcaataacgaggccttctaaaacttggctttcttaagaacacgtgcatggagctgtttataaagcaatttaaaatcatacttggaaaattctccataattatagacggcacagggtgttccaattaaccaataaacaggatacaaagaggactaacacaatctagttctaatttgcaggaagaaaccgctcagggatcttgagtacctttgaaaatttctttccttttaactgatacgcaatttgctcaaactatgattaattttaaagtttacattttaataggattttcaacacatttcaaagcaaatgtgataattagataagaaaagatgggaaataaaatgttcataggtaagtttttagaatagtgagcaggcccgagctgctctaagagactctggcagtctataccaaggagaacatctgtgttccccagaatgggaagctggttcctctgatgcctcactgctttctacacagcttcactctgattttcagtaattaagttgactgtgaagcttttaaaattaacgctgatatctactgcgtcaagaagggtccagcttctgaaatacggtcgtcgagactcttctccgtccaggcccaggcctcccttgccagctgcatgactccctcctccctgaactcatcttccatgcccctccaagccccagtactccttcgacttcagaagaacagttgcccaccattgccatggaaggactgttttctggaggaaatgcactgctccagaaataaaacagacataggaacatggggcctccaatgaaaaagatggctggcttactgctcttcagtgaagcccaccaagcaagaagcccacctgtgaacttggtatgtccatgccaactgttagcagtcactcttaattatgaatgaatgggcagccatctgacagggccttgaacgctgaagtcacacaagtcccagttttacacagatctcactagaagggttaggaaaaaaaaaatcttccaaaaagtggaatgaaaagaaaaattgaaaaaacaatgggaaaagaatattaaagatcaactcgggggtctcagagctgctcactgaagttccggagaaaagcaagcactgggaagaaaatgattgaggaaagaatgcaaggaaggctaggcacagtggcttcgggaggccgcagcgctgaggatcgcttgagcctcggggttcaagacccagctgggcaacatagcaaaaccctgcctctacaaaaaataaaataattaactgaatgtggtggtgcacgcctgtagtctcagctacttggaaggctgtggcaggaggatcgcttgagcccaggaactgggggctgcagtgggctgtgactgcactaccatactccagcctgggtaacacagtgaaaccctatctctaaaataaataaataaataaaaattctaaaaaagaaacaacgcaaggaccagagaactggatactaggagtgtcaggttctagcgggacgtcacctgcccggcaccatgaactgaccacaagacacatgatgatggaattttagggtaccaggtagaaagcgagagccacaaaagcttcagaggggaaaaataaaatcatatataaaggctggggattttaaaaaagcatcaaatttctctcgatcagcactggtagctagaagaaatggaatgatattagtaccttcacaattcttaataaaaatgatttctgttatagaattctagacatagcagtctacaggttgaacgtaagtgatatataaaatttcaagtaatacattcccacgcatcttttcttgggaggttttatggactcagtgtgtttggttcaacggctcaacaggttgtttctgtggaatatgacaagagtaaggcacaggagcaagagactatgtctttattgtcagtttttttggtaccacttgacagaaattgttaatatgtgctttgaaaaactctcagccactagtctgctctgctccagcacattcccgagcacgagcccatgtgtggcagggcttgccattctccctccctgttctcagcccgttttcatctttttagaatattcacatgctctcatctcttctgtccttgatgccatatcaagtgatcctatgtataaattttgcctactgaggaatctttctgcgtttcgattattatcagctatcccacctggtttcaagtcatctgtaaattagatgatgccatcaatgaaatcaatattcaagtcattgttccaaagctgaagagcgtggggcacaagaatgctctggcgtacccccagtttctcagctggggctccccagaaggcagagtgtatttgggaatgtgatgccagggagcagaagtacaggaagggaggaaggagacgggtgggcgggtgagtcagcgcaggacgcgttcctgagctgccgccgcagagcccactgatgctgatgccagtgggatcttcctaggactgcatgtagctgctagcttctatcctcccctggcggaggaagctggggtacatgggatggtcctgggctgagggccgtcccactgcccctgcacagagtgaggagtgctggactatgagttgatgtgaatggatttggaaatggcccacgagaggcatccaacacaattagaaaccttgctccaggtgttgactgagatttaaatattaattgatctgcttggctgccaagctgcagctctgcatctcatcctctgggacctcgtgccaggctctgccagcctactctagctggaatccagacgtgcctgtcatggcacggccgtctacgcaacagccacaaaagaaaggcaggtgaatctcctgtaaattttttttttggtcaattcatgaccgattccattcattcataaatctcagctgggattgatactacattccccagcctctgctttttgagaaatctatctgctctttccttttatctctggcctccgaaatcagacctcttctccgcaactcctccaatatcacgaacaggttaggaatctcctttgtaagttccctttaatgctagaatgtgattcatctggatcagaaatgagatgtggttcatgctgacaggtgctctccgcaactattgtgggctttagtttcctcgaatcactattactttacctcttccactttgaagatcattttccttgataatgaacaaagtacagtttgagctgagcagttctgttttctctttattgacatcagcagcatcagcctggaacaataggaccggggcttctctttccttcctgcttttaaaataatcaagcgccccttccctttgtgcctcttaattttaacactaaactaggattgtcctgggcagctccctcctattcaagctttccttttactttacttttgatcatgtgctctgcattctgtattctctactcattcttcaaggtgggtggatcacttgaggtcaggagttcgagaccagactggccaacacggtgaaaccaagcctttactaaaaatacaaaagttagctaggcgtgttgttgcccgcctgtaatcctagcttctcgggaggctgaggtgggagaatcgcttcaagtgagccgagattgcgccactgaactccagcctgggcgacagagcgagactctgcctcaaaagaaaaaatagtgcttggcaaacagccacttatttggatacttgcttgtttttttgttggcattattcaaaatcacattgcctggaataatgtaaagaacaaaatgaagttgttctggattataacccaaaaataaatatccataaatccatactgaaatagatgactgaataaacaaacagatggagaagggacaaatctcccttgcagaaaaatcccaactaactcacgtagctgctcagccctcacggaggtgaagcgtcactccccatggctaagtgtgggctgtacgtggtgacttccttcttgggactatggcatggaaaggaggaagaagaatcatctcatggtggaaaaacctggcacacctcagccaggtaatggagagtggtaagtcacacaggcagtaagcaccctggagacggtatgatgaaaagggcactttacctctctctggtctttctcctccaaagccacatgcccagtctaatcatgataaatcatcatgcaaatctcagtagagggcattctggaaaatacctgaccaacactcctcaaaaccgtcaaggtgtcaaacacagggagtacctgtctgagaagctgtcccacctaaggaggcatgatgacgagacgtgatggggtaacctagatgggatcctccaacagaaaacggcattatgcaaaaactaaggaaatctgaagaaagcatggactttagcaaataaccatgtatcaatattggttcattaactgggacaaatatagaccacactaacgcaagatgtcaaaattcaactgggtgtggggtatatgtaaattctctgcactagctttgccatgtttctgtacatctaaaactcttataaaacacttgttaaaaaaaaaagctatcatttgtagagtattgctaaaagaagttacattgccactgtgaggaaaagcctggatcattcctaatgcttccccccaccaatcctagggtgtgaggattccattatgaagttttatttatttttgggcctctcataattctcgaggtgtcatcttttggaatcactaactgatgtggtttggctgtgtccccacccaaatctcatcttgaattgaagctcccataattcccacgtgtcatgggagggacccagtgggaggtaactgaatcatgggggggagtctttcccatgctgttctcatgatagtgaataagtctcacaagatctgattttttttttttttaagacagattcttgctctgtcgcccaggctggtgtgcaagtggtgcaatcttggctcactgtaacctctgccttctgtgttcaagcgattctcctgcttcagcctcccaaatagctgggaccacaggtacccaacaccaagcccagctaattttcgtaattttaggaggacggtttcgccatgttggccaggctggtctcaaaatccaggcctcaagtgatccacctgcctcggcctcccaaagtgctgggattacaggcgtgagacaccgcacccagcgatctgatggttttataaagaggagttcccctgcacaagctctctctgcttgccgccatccatataagacatgacttgcttctccttgccttccaccatgattgtgaggcctccccagtcacgtggaactgtgagtccattaaatctcttttcctttataaattacccagtctcaggtatgtctttattggcagcatgaaaacaggctaatacactaactgatacctatctttctctgaattcctgggcttatctggaagggaaggggatgtcccccctctctactgtgccagtcatgaagttactgtctctctgctccatgcccatccctctaacttggcttggtgatgctgggactttgcagaccctgtttcggtgttgccaactggctctatttcaggttctgacaatacaggagtctagggagggactcaaagccagagcaggaagaagggcttgctcctcccgtcagcggctagcagggctcctgtctgcctgcagctcccgtgagctccacccaggcactgccttacctgggcaccgaggcacctcctgtagcagcggctgaatacagtttgttgttttcccattttgtgcaaaatgagcttcctcaagccccaactcccacccagagacataagcaccagctagaaggcacgcgccaggaccccctctcctccacgacactgtggagtacaccagactcacacagcatcatggtgaaacatgggtcactgagcctcatccccccgttttggattcgggtctcagattgggtctgatgagctgcgtttttaaaagttccagctgatgctgaagctgctagtctgggaatcagactttgagaacactgccttagaggtctttatttgtcctttcagttaccagttaatttagatccagttaacatttgcttatgttctttttctgttcaaataactggtgtggcttctgtctcctgactgaaccttgactgatcaagaaactggcaccacggccgggcacggtggctcacacctgtagtcccagcactttgggaggctgaggcgggcaggtcaagaggccaggagtttcaggccagcctggccaacaaagtgaaaccccatctctactaaaaatacaaaaaattagccaggtgtggtagtgggtgcctgtaatcccagctactcaggtgggtgaggcacaagaattgcttgaacctgggaggcagaggttgcagtgagccaagatcgtaccactgcacttcagcctgggtgacagaatgagaccctgtctttaaaaaaaagaagaagaagaagaaaaaagaaactgccaagactggttcccaggaacagaggacttggaattggtttcccatccatgggtttaacacagtgttgagctctttgtcagtgggaaatcagattcctgtaatccagggcaggccatggcattgtgactaaaaaagccatcatctgtgcctgtgatgacatttgtgtgccagggcccacatggccactgcactggccactgaggcagaagccaggaccaaaggactcagtatgacagcattctgtgagtgcgctggggcctctgagaaaacctcaagcccaggtctgggacctgcacccacagacagagaacccaacaagcctctatggcagtccccagagagtctatttcttgtagctacagggctgtttccaaaatcaaacacaaagcataactctgcggggtgtggatgcacaggcggaattggtggcatcaccaggtttgatgggaaagctgggcatggatctggaaggagtgggaccctggcaccggacagagggacatctgactggactcagatgaagctgagattccagattcgggagttcctccgagcctcccatggcagtgggaacagctggctccccagtgtctgagaatcacctttctttactcgaaagcccagtgacaggctttcctagggcagacgcctagcgtgggcctctcaccctcccacccttgccaccccttgacctgtaactggggacaggtttccgcatgctgcaggggaggaaaccacttatatgcaaaacaaactgtgagatcttgccatttcacagctgcagaaaccgaagaagtatgtatgggaataggtgctagtaacgttaggacaaagacgagaaatttaacactagtttggtgggactgattgctatgagtggtcttatgagaaattgttcattaacattttgtgcacgcagccggcagtggctctaaccgctcacttggttgactgcctgaagtgcagggcactgctgagtccgtgtttaatgaggctgagatgccaggcttctgtggcacagtgaactatacaggaggaatccacaggcttcgggagacaggggcattggcacggatttgtcatgtgccacctgcacattccatacccagaggacactccctcctggagcccctgaggaatgtacaggtgaggggccccttcaataggaaaagtgaacttgtcactgcagcagctgttcccaatgtagtatcttgggggacccacagcccctgcctggacacatactccttttctctataccaatctacaaggacccctagacggagtctgctttacctggcaacaggatactttcacccgtgtgtctcaaggctgcggcacccccgctctctaccttattatggtctgcagagaagctggccatcttcacactgcacactgccacactggcccatgcgctgatagcggtgtgggctggactagacaggcaggaagtagcagagctctaggtgcctctgtgagatatgtgccgggcagagcatgagggacagaccccgcagaaccgggggtctcacaccccagaacggcctgaaacactggagacacccctccaatgggagcttcaagttgtcactccacactccacctgccactgcaaccaccaggcaggtgttttggaggcaacatgcaccacatgtgtacgtgctactctgacaccggtactgagtgacactaaaagctgttttcagagaggcccagggcacgatcaggcatgtggcaagtccaggctgctcttctgtgtggccttaggacccagcaaggttgatattaggggtgctgtaggaagcctccaccaaaaggaaatttacagagcagacattgagggttttgagggaagattaaccccaaaacaaccatgccttctcctgcagataatgactctcccgctgggaaacagttcctggccgactgcaccaggcccttatagagaccaaacaagctagccacgagatgcggagaccatgcaacctgagctccccatcacgaacagggaactactaggccccccaagccgaatgctgagcatgcacagcgaccctctctcgccaggccgagacggggctcgcccaggcctgtgaagtacatggacactgcatgggtacatgatgcagctgctctgacaccggtgcctcccctacctcgatccacacccagactcgggggagctccttatgagccactgactgatggagaaaaagctgggcttggtttacaggtgcttctcctgctgggctggcccctgctggcactgcacagtgtggctcttgaggacagtggggattacatcccccagcaggcagacctcccagttggacatttgatttccactttatcaggactgagatggccaggacatatctacatggatccccagggtgattccagtattaaaccgaggggaatctcatggaacccaactgcagggagtccagtcggcctctcaagagaccgaagatggaagcagaaaagccaagcccgagactgctcttccccctcattctggtggcacaccctcgcattctgctctcctctcattggctctgttctactcctgtctgcgcacactctttcagcttccctgcaagtggctcgccttggtccctagagcagttacggctctgatgacgtcgtatcctcagagtaacgtggtcattttgagtactgttctgcagcttactttttcttttcctaatcaatgaatcaatgaatatactcttgacaaacattttctccattatgcagtattctattatatgcctatgcgaggatttatttaactggtctcttaggttgttttgggtacgcggctattttgtttgctttcttagctcttgagggtgtgtcaatggctattactgcagcctgtgtctagaaaatactcaaatcaccccttttcaaatacatctttttaccttgacttaaccaatgccaaacaactctctccccctatttccatggtaatgcatctcagctcctctcaacttagaggctcacaggataaacggcttcccggagatgatgctcacagctcctcttaattacggaagtgatatttactggatcagtcaccttggacatccataaggcattgcatttttcatgtattactcacttgactttctctagggtttagccaaaatgagtaatacatggaaagctgggtaaaagtcaaatcagctgttacttgttattattattttttgagagtcttgctttgttggagtcttgctctgtcatccaggctggagtgcagtggcacaatctcggctcactgcagcctccgcctcctgggttgaagcgaccctcccgcctcagcctcccgagtagctgggactacaggtgacttctaccacactcggctaattttaatttttgtattcttaacagagacggggtttcaccatgttggccagggtggtcttgaactcctaacctcaagtgatctgcccgccttggcctcccaaagcgctggaattacaggtttgagccactgtgcccggcctactgtcgcttatttttaagttggtagaaatgccggtggtcagaaaatctggtattttaaaaagtaaaccttctgggggatgggcgtgaggctgaaataggttgagccagtagttcctttattttgggaattcagaacttctcattattttgttattgaaacatgtagtcacagttctcgagaccgcatctcttaaaacaactgcctactgttttccctactataagattgtatttggatgcttccttctttgtgtcaaataatcaagaatcttagggttttaaaagtgactctgaaggttacctggtccaaagtgaactcagcaaagaacataaagccaatttgcaaaaatcaattgtatttccatacgttaacaagaaacaattggaaaatgaaattaaacaaaagcaaagtcatttttggtcatcctgtaagtcctgggtggcaggcacagaatacaggtaaggggctccaagagcccggggagccctctgaggacgcacggcaggtgtggggcatgggaacagaagcaggccacacctgggggtccctggggaggtctaaagggcctggtggagcaggaagagcctggaaggatcatctaaggcagggctatgggagggggtggatacactccagggcacctttcagctggtgctcccgaaggctcaggctgaggcagcccttccagggcccttgctgggtgtcttcccctgccctgctcttcctctgatcccttcatgcttcctcctgggagtgcatccttcataaacccatgaattcttggtttagcatttacttctgaggaactcgactgaggacaatcctacttggaaaatatttatgtagaaacaatacactaaatgtatacgcacagatatgtgtgtagacacccatttgattacactgaatgtagtttgatcacggtattgagtatattatttaggactttttgtatgtgattataagttacattgatataaagtaagttgcaatacgcataattttaataccaaaatgttaagattcaaattttctgggaaaagagatcggtaaggttcttctttcaaaagattgcccatttttgtgattttcttcttttttaccaatattatttcaaatttatcatatgttctactaaataactaagaaagaccatgaggatatactgagcgaggccatacagtttaataatgaacagcttaggttctaacacacattagacaggcctgtgttcaaaaccccatcttgtactagctctgtggattaggtccttaaattccacaacaacttgtggactaagctttctttttcttttttttttgagatggagtctcactctgttgccaagctggagtgcagtggcacaagctcggctcactgcaacctctgcctcctgggttcaagcgactctcctgtctcagggtcctgagtagctgggactacaggcatgcaccaccacacccggttaattttgtatttttagtacagatggtgtttcatcacgttggccaggctggtctccaactcccaacctcaggtaatctgccagcctcggcctcccaaagtgctgggattacagacgtgagccactgcacctggccaaagctttctgacttaagttcttaaactctataatttgagcttccctgtctttaggaagaagacagtaatagcacatttcttataaggttgccaagatgttgagaattcagataaaacctcagcacagtgcccgatagtgcaaaggactcaataaacgtttgctggcattgctggttttaaattactgtataaagtagtagccatccaaaaaataccaaaaaattcatgaaaatggagtacacttacttgtaatgtagtatcaaagacaacaagctttgaactggttggaacgatgtcataacacttgtgtgacctcatgaatcgcatgtaaacaccactttctgagtcttctactgctaaaagaaaaaaaggcaaaacatcagtaataataaagaattccctcaatcggatgaagagcatatacgtaaacctatcactaacagacttaatggtaaaatacgaaatgttttcccagtatgatcaagggccaggcaaggatgctcactctcactaattctatgaacactatattggaggtcccagatggtgaaataaggcaagagaaaaaaatgaaaggcatacatgttgaaaaggaaaaagcaaaactgtctttatgtgcacactgtatgattttctacataggaaataccaaagaatctagaaaaagttcctagatctaaaaagaatgagtttagcagggtcatagaattaaatcagggttaataaaacaaagacaaagctaatcgaatggggaaaagttggaagctttcccttcaagatctggaacaaggccaggtgcattggctcacacctgtaatcccagaactctgggaggctgaggtggaagggtcacttgagcccaggagttcgagaccagcctgggtggcatagcaagacccagtttctacaaaactaataaaataaaataaaaataaaaataaaggggaaaaaaaagaccaggaacaagacaagaatgcctgctgttgctactctgttcaaggtagtactggaagtccttgtcagagcagtcaggcaagacaaagaaataaaaggcatccaaatatggaaacaaggaagttaaattgtccctgtttgcagatgacataatcttatatatggaaaaccctaatgactccatcaagaaactgtcaaaactaataaattcagtaaagttacaagatataaactcaacataaaaaatcagtagcatttctatacactaatagacaactatccgaaatagaaataataaaagaatcccatttacaatagctacaaaaaaacaaaatactcaggaattaatttaactcaggaggtgaaagacctctagagtgaaaactataaaacactgatgaaagaattgaagcagaccaggtgtggtagcacgcgcctgtaatcctagcactttgggaggctgaggcaggcagatcacctgaggtcaggagtttgagaccagcctggccaatatggagaaaccccgtctctactaaaaatacaaaaattagctgggcatggtggcacaggcctgtaatcccagcttctcaggaggctgaggcacgagaattgcttgaacctgggaggcggaggttgtagtgggctgagattgcggcactgcactccagctttggttacaaagtgagactgtcaaaaaaataaataaaaataaaaaaaaagaggaagaattgaagaagatacaaataaaagggaagatatcttgtgttcatggattggaagaatattgttaaaatgaccacactatccactgtgatctacagattcaatgcaatgcctatcaaaataccaattcttcgcaggacaagaaaaaaaaaatcctaacatttgtatagaaccacaaaggaccccaaatagccaaaagaattttgagcaaaaagaacaaagctgaagatatcacactacctgacttcaaaatgtactacaaagctataataaccaaaacagcatgaagctggcataaaaacagacacacagacaaagagaattagaaagcccagaaataaatccacacattacagccaaatgatttttgacaaaggttccaagaatacacaccgggcaaagggtggtctcttccataaatggtgctggaaaacctagatatccacatgcagaaaaatgaagctggactcctatctctcatcagatacaaaaatcaatggaaaatagattagagactgaaaatctacgacccaaactacgaaactactagaagaaaacataggggaaatgcttcatgactttggtctgggcaaatattttatggataaagcctcaaaagcacatggaacaaaagcaaaaatggacaaatgggattatatcaaactaaaaagcttctatcctgcaaaggaaataatcaacagagtgaagagacaacctacagaatgagagaaaatatttgcaaactatacatctgataaagggttaatatccaaaacagattaggaactcaaacaactcaacagcaggaaaaaaaccccaaataatctgattaaaaaatgggcaaaagaactgaatacacatttctcaaagaagacatacaaatggccaacaggtatatgaaaaaatgtccaccatcgctagtcactggagaaatgcaaatcaaaaccacaatgagatatcacctcactccagttagaatggctattataaacaaaacaaaacaaaacaaaagatgagtgttgctgaggatgtggacaaaagggagcccccccccccgctcttttattgaactattggtgggaatgaaatataaattagtagagccattatagaaaacagtacagaggttcctcaaaaaattaaaaatagaattaccctatgatccagcaatcccactaccgggtatatacccaaaggaaatgaaatcagagtgttcatgacacatgtgcactgccatgttgagtgcagcactattcacaacagccaagacatggaatccacctaagtgtcgccaaaagatgaatggataaagaaacgtggtacctataaacaatggagtactattcaaccataaaaaagaatgaaatcctgacatctgtgagcacaggatgaacctagaggacactgtgttacatgaaataagccaggcgtggaaagacaaataccatcccattcatctgtggaatctaaacaagctgatctcacaggagtagaaagtagagagtggttaccagaggctggggagggaatggggtgggggtatgaggagaggttggtcagttacagtcagacaggaggaatgcattctggtgttctattgcacagtggggtgactatagttaacaataacgtattgtatagttcaaaatagctagaagggaggattttgaatgttcctgccataaagaaatgatacgtgttttaggtgacagatatactaattatcctgattttatcagtacacaatatatacatgtactaaaacatcaaactgtatcccataaatatgtacaattatgtgtcaaccaaaaataaaacttaaaaaaaggaaaaaagtacaataaagcaaatgcaaatagaaaaaaaaggctactatatttgtatctactaactcattgttagcagacagaaatttaaaaaaattttaaaggtactatttacataaatgctgtatggaaatacggacttacacagggaacagagagcactgaaaatggtaacaatgtggacaaatatacaaatgctttcaaaaattatttaaatctctctaaaagctaattgacaatttatttttttatgtattttttttttttgagacagagtttagctcttgttgcccaggctggagtgcagtggctagatcttggctcactgcaacctctgcctccaaggttcaagagattctcctgcctcagcctcccgagtagctgggattacaggtgcacaccatcacacctggctaatatttgtatttttagtagagacggggtttcaccatgttggccaggctggtcttgaactcctgacctcaggtgatcttgcatggctcggcctcccaaagtgctgggattacaggtgtgagccactgtgcccagccctaactgacaatttaaacaaaaataatgacaatgtattgtggggttgatagcacactgataaggaaaaggcaacaccgtccaaccaatcatggaaatctaggagtcacccttgccaatgtcctcttgtcaccctaaccaatttatcacaatgccttgattttgcaccccagaaccctcaaatccactcatttctctgcctccatggccaccccctacatatcctaacttcctcaccaatccttctgccccctgcatcttccacagctgtccacactgcatccaggaagattttgccagatgcaaatataatctaatccagatgctttagaataaaggcaaaacccttgaagtcacctagaacagcagtccctaggactggttttgtggaagacaatttttccactgggggtggtagtgggtggtttcaggatgaaactgttccacctcagatcatcaggcaccagattctcatcaggagcacacaacctagatccctcgtgggcacagttcaccatcgggtttggactcctatgagacactaaagctgtccctaatctgagaggatgcacagctcaggccataatgctggctcacccgccccttgcctcctgctgtgcagcccatttcctaacaggccagggaactgtactggttcatggccccaggattggggacccctgacctataagacctgggaggcctggcccccgcctacctccctgcctcttgtattaaacactcctgctccgtattttctccaaccccctatttttttccagtcctccatcagtgctctgctgtctcttccatggggcctgacactactgcttcctctgcctgaaatactttctccgtctgtttgtggcccagtgaactccttcattagaccttggctcaaggatatgactggtgagtcatggaacctgaatttgaacttgaagcctctggattccaaagctgtgttctcagccaagctgatccccctccttccctcggcccgccacaactgctttccccgttctgccgaaatccttccctattttcatgggtcagtccaaattatgccatctgcaagagacatccttgacagctccattcagcccacaccgatctgtgcattttaggaagatctggactacttgggaaatatctgagaagaaaaacatgtagtgtataagctaattagcaaaacaagtgttaaacaagtgatactaaccaagctctttggctgtggaaaggagccccacaattttgtatatttcctactgtggacatccatgcagctggtttgccaatttcatgacaaatgatgtggaccactctcaagtctattttcattctgacctctctttgggatattacaatttataatgcagagttttgtcactgcaactgcctcctggatatttctctctcaaatgtctccctcctgatgtggaataaattccagacgtctcctgtctcattcatgcatctccacatctggcttctccgcagccttatttcccagctcctggtttcatgtctaagcaaacggtctccctgtcagtctcctgtagcctttgacctctcccttcttgcccttgttcactcacttgccttaaacgtcctcctccttgacttttccttgttcaatttcaatccaacctcaacggacatcttttcccacaaaagaagtgaacgtctgagtgctcattacggaccaggtactgcaataaatcacctcacttaactgatgtgacaacctcgaggaatacagcttcattttttcattttacctctgaggaaaccgaggctaggagaagctgcgtcacttgccccaaatcagacggtgaagtagtgacccaagcgggatttgaagctctgtcccaggctccagtagctccttattaaactcacttccctcactcaacggtgcgctcatctgagcgcacctggggaggacccctgtgtcctgggccctgtcctggggttacccacagggggacacaatgaccggttatccaccctcaaagcttatgcatcagcccagggtgagcactggatcacctgagaacacacaggtgggtcaccaaccctgacctggaaagggtaaggaaatctaaaatgacttcttcccctgaacgccaacagcattttacttctgtctcatcagttattaccttctatctcgttaacagtgactgtgtatttctaatatttttttccttcctgggtgataatttatttgaatgatcagtatcttactcaagtaatccatacattaattcagtctataaatatttattgcatattgtctagtgtgcattcctcccaaagctgatcctgagaccatggaaagttaggggaggaaaaattcaaaagaaagggtgcccagtaagcaggttataccttcgtgaccctggagtgaagctatgagggaggatgctctgaggctgtacagacctcagaactgtctcgtgggaggaccactcctgccctgcctgggttccaggtaattcctgggacatcacccccgtcatttctacccacaagcccagttgccaaagaatgtcctggggcagagatgttgaaatatgagaacttggatgagacaggattctggtgaggcacccgcagcatccactgtgcgagaggcggggatgccgcagggaagacaacaaacacaacccttgtccttacagacactgcaaaccaatggaggggacagtgactgtcatcacactgccaccagcactaccaaggacaagctcggggttcgtgaatgaatagcagcggctgtcagggagggaacggatggacagatgaagtttcagttggtgtgctcccatgtttctcaaaacactgatagactagacagtgagggccctgcttaagaaaggcctgaaacagcaagctctcatgagagcggcacagagagatctggtccgtgtccgccatcgctgctaaggatgacgctcctcgcgcagccgcatgcgcagtctcctcatgcctactgagtgtggaattggcgcaaaacaaaagccaaagatcagggcagtcaagcatacattcagccagtatttaagttacaaattgcctgccaaatctaacatcctaaaattcaaaagcaagaaatcaagagggaggctaagtatagtaaaatgtaacaaaccatctcccagaaaggaaatctcagaagataattttgttcattcattaaatcaagaattttcataaaagaggtacacatattatagacatattatacatgttagtattactatatgaatatgtgaaataattgaaaataatatagggcaggaatgttcaaacttacagaatttttgaaaatctgtaagtttggtgttagattatatttttaatataccattttaatgtgttgatttctaaattatttcaatgaacattgtattttgaataaatatatgttccagatttacaaaaaagttgcaaagctggaacagttcctatatactccatatcaggttcccccaagtttatcatcttacgttattgatatggtttggcttcgtgtccccacccaaatctcatcttgaattgtagttcccataatccccacgtgccaagggcaggacctgctgggaggtgattggatcatgggggcagtttcctccatgctgttcttgtgatagtgcctgagttttcaggagatctgagagttttataaggcagttttctctgccctcgctctctctgttgcctgctaccacgaaagacgtgcctcttcccgttcagccatgattgtaagtttcctgaggcccctccagccatgcagaactgtgagtcaattaaaccgctttcctttataaattacccacccagtctcaggtagcctatttaaagcagtgtgagaacacacggtttttctcagtctttgggttacacagtttcattctcatcatcacacggaggcacccgctccatactcaccacacacggaggcacacgctccatactcaccgcacacggagggacacgctccgtcctcaccgcacacggagggacacgctccgtcctcaccgcacacggagggacacgctccgtcctcaccgcacacggagggacacgctccgtcctcaccgcacacggagggacacgctccgtcctcaccgcacacggagggacacgctccgtcctcaccgcacacggagggacacgctccgtcctcaccgcacacggaggcacccgctccgtcctcaccgcacacggagggacacgctccgtcctcaccgcacacggagggacacgctccatcctcaccgcacacggagggacacgctccgtcctcaccgcacacggaggcacccgctccgtcctcaccgcacacggagggacacgctccgtcctcaccgcacacggaggcacccgctccgtcctcaccgcacacggagggacacgctccgtcctcaccgcacacggagggacacgctccgtcctcaccgcacacggagggacccgctccgtcctcatcatcatactgagggtacacatgccttctcatcccatcctatccagggtgcctaaaatcaacgtgactcatcaccttaatcacctgagtgaagtcatatttgtcaggtttctccaagtagaggtactctttccctcctcctttatgtactgtaatctttttaagaaggtcactaggacccctcacttaatggcaaggagttatgccctacctccttgtttaaaataattatgtacaggagagttatttatttatctgatcatttattcatatcagtgtagactcatggatatttacttcaacctaggtataatccaatcctaggttaggagcggtcagaggctgtgccccagccagtcaggcacccacctgtggctgatggactggtgggtggcttgtggagccctctcctagttaagacagtttccaagcctgccatggcttagactttctggcaggtcctccagcactgccttcacacacaggcagccccctagttggctggggagctgtgggagtgtggcttggtgctccctgcgtgggcttcctccgtcatccagggaggtgtgcagagctgggctctcctgcctctgtcctgcatgcacacagcctccagggcagctggaaatgtgtttccccatcatcaacatcttgcattagcatggtgcagcggttatagttaagcagccaagaaaatcataatgaatgtgtctaggtacagtggctcccacctgtaattccagcactttgggaggccgaggcaggaggagccctggaggctaggagtttgagaccagcctgggcaacatagtgagatcccgtttctacaaaacataaaaaaaattagccaggtgtggtggtgcacacctatggccccagcctactcaggaggctgaggtgggagggtctcttgagccaggaggttgaggctgcagtgagctgtgattgtgctactgccctccagcctgggtgacagagcaagactctgtcacacacacatacacacacacatacacacacaccccaacaatgtattaacaaaagtctccacattattcagatttccttattttttccttaatgccctgtgtctgtctcacgatcccgtccaggattccacatgatggtcgggagcatctcctcgggctcctcctggctgcgacagtttctcagaccctccttgttgtgatggccttggaagctttgaagttctgatgaggcactttggaggatgcccattggctggaagaggtctcatgcttttctcaagattagaacctctgtaactgggttccaggtttgggggaggatctacgacattttttaaaaatataaagcactcgaccaaacaaagtaacatgttaaatatttacttatttatttattttggagacagggtctcgctctgtcacccaggctggagtgcagtggcacaatctcaactcatcgcaacctccacctccagggttcaagcaattcttgttcctcagcctcctgagtagcttggattataggtgtgggaaaacaagcctggctaatccttgtatttttagtagagacggggtttcaccatgttggccaggctggtctcaaactcctgacctcaagtgatctgcctgcctgagcctcccaaagtgctgggattacaggtgtgagccatcacacccagccgtaaaaggttaaatatttaaaataaattataataaaccctctttgaatgtgtaaaaccagttaaaaataattttaaaaacaaaaataaaatttataataaaatttctttaaaaaatttttttaaattaaattttatggctgggtgcagtggctcacgcctgtaatcccagcactttgggaggccaaggcgggtggattgcttgagaggccaggagtttgagactatcctgggcaacatggcgaaaccccgtctctactaaaaatacaaaaattagctgtgcatagtggtgcatgcctgtaatcccagctacttggcaggctgaggcacaagaattgcttcaggccaggtgcagtggctcacacctgtaatcccagcactttgggaggccgaggtgggtggatcacaaggtcatgagatcgagaccatcctagccaacatggtgaaaccctgtctctactaaaaatagaaaaattagcctggcatgatagcacgcacctgtaatcccagccacacaggaggctgaggcagaagaatcgcttgaaccctggaggcggaggttgcagtgaactgagattgtgccactgcactccagcctggcgacagagcgagactccgtctcaaaaaaaaaaaaaaaaaaaagaattgcttcaacccaggacatggaggttgcagtgagctgagattgtgctactacactccagcctggggaacagaatggtactctgcctcaaaaaaagaaaaataataattaattttaaatagagatgaggtcttactatgttgcccaagctggtctcaaactcccaggctcaagtgatccacctgccttggcttcccaaacttctgggattacaggcgtgagccacctacaaattataataaaatttctgttgagtgggaataaggacagattattactgatgtaataaaacaacatcaatcacaacaaaagtataagctttttaagctaggaaaatacagtaaaatataaaacgttcctttttaatgtcgcttttctacttttagtataaactttacgattataggtggcaccatctgtgttagttacattatggtgaagtctcacattgtacttggaggaagaaataaattgaaacagagtgaaaatgagtgtaatttggagttatacaacaacaacaacaaaacccacccaaattgttcaacaacaggctgtttaaaatatattatcaaaattccttggccgcgtgcggtggctcacgcctgtaatcccagcattttgggaggctgagctgggtggatcacctgaggtcaggaattcgagaccagcctgggcaacatggtgaatccccatctctatgaaaaatacaaaaatcagccgggcgtggtgacatgtgcctgtaatcccagctacctgggaggctgaggtagaggaacggctggaacccgggaggtggaggctgcagtgagccgagatcctaccactgcactccagtctgtgcaacagagcaagactccgtctcaaaaaaataaataaaataaaataaattatcaaaattcctgagagggcaagaagttccaactccatattcaaaagctaactgaggttaagatattaacacaatgctcccttcttgcttttgatattttcagtgttataggatagaagcataattacagagtatcacactgggacttgagttactgctctacaaaaggaagaaacctgtttgcagactgatgttaaatctcactactctttaaacagatgccaacccaacattattatgcaagggagttgctaaagaagaatatgagtaagtagcaagtttatattaaagtgtttaattcataaaggttaataacaaacttttacaaatgcaacatctaagtttaaatgcaagcaattataaacactaaattgaaatattggaagtatttctcctattaaaaacaaatctgattacataatatgcttgtttggtacctttgtttgtttttttgagacagggtctcactctgccacccaggatggactgcagtggtgcgatcatggctcactgcagccttgaactctcaggctcaagcaatcctagcagctgagactacagatgcctgccattacatctggctaacttttttattctgtatttttttttttgtagtgatggggtctcactatgttgaccaggctggtcttgcacttttggcctcaagcctcagccttccaaagcactgtggttataagcatgagtcactgtgcctggctgctcgtgtcctccctacctacacaatataccctgtatcattcaaggttctagaactcgaactctaacctacctttccagcctcatctcctatcacatcccctaggaatctcatctctaggatcatttcaacatatccttttcaaaggaagggtttgaactttgggaaatccagttttgagaatgcgttcctcatgcttctgttctgtgcctctgcacacactattctttcttcctcaacagtgccttccctgttctcctatggtcacctgacatcctgcttgcctttctgcagtgggctgaacagtggcctccgcaaaaagacaggtccactggaaacatcagaatgagaccttatttgcaataagggtctctgcagatgtaactaaggtgaggatctggagatgaggttatcccggattagggtgggccctaaatccaatgacaagtgtccttataagagagagagagaagatgcagcgcggcacggaggggagggccacgtgaagacaggtggaggctggggcgacgcagcgacaagccaaggatgccaaggactgccggcaacagcaggagctgagggcagcgtggggcggattctccctcagcctccagaaggaaccacccctgctgaggacttaggaaccaaccctgctgatgacttactccagacttctggcctccagaactacaaggaaataaacttctgttgtctaagccaccaagttgtggcatcctgggaaactaataggccttcaaagttcagttcaaaggctacttcctcccataaaaccttccctttgagcccctcaggtcggaattaactgctccagttttgacatgcctgttaatgcttcgtgagtcacacacaccttgtactgaagttacaggtctgttcttcccttagacatgcgcaccggggggcagcagtggacgtcccttgctcttctctataatccaggcccctggaaggttcattgtagatatcaggcatgagttaatgcctggtatcttgcaagtcactgaagaagcacagatcaaatttgagaggggcaagtacggatctgagatgactatattgtgttcctgacctcagagaggaaatgtcagcaaatgaagcacgcaggtttaaaagaacactggtgaatctagatttaataaccagtataaaaaaacaaaacaaaacaaaaacctttatatacctttataagattaaaggattacctttatattcctttataagattaaaggattagacatggatttttttttttgtaagagaaataatgcacctatgaaagtgcctcatgtgatttttttctctttctttctttcttttttgttcaagatggggtcgcacactatgttgcccagcctggcctcaaactccttggttcaagggattctcccacctcagcctcccacatagctgggactataggcatacaccactgcaatttttgtttttttaagtgaaacagcattgatctaaataaagctttaacatgtttacaagtatattttatattgaagctattttctaattctattagacaaaaaaatgcagttgaattgaataagattgcagaagaccttcaaatgttcattctaccatacacattttaaaaacacctgcaaatacagcaaacaactggacaagtatgtttcagagataagcactacagtcatcaattactttttctgaaacccatttacacagaattttaatttagaaagaatttatataaaaaaaatgtgttgtaagacggtgtaattctttggtcttcttggccttaattctatgaaaatgaacaagacagactatcactaatcatttattagtcaggcaaaaatactaaaggataatttaacagacacataccagtatgaaattcattttacttatacaccttaatcaaactaagagcaggatagtgactcaaaatggatttcaacgtgtcctatttataaaaataacaactgctaaaataatccactactaaccagacagttaccatcaatctgcccgtcccaggttctctccccactgatactggcaacacccacacagtgagggaatagacgccccgagaagcagagcgtgaggactcacttcccaccctcaagttccacacttcttttggtccagtcctggaactcttgtttagtctagaaggaggattgtcccatcactcctgggaatggttactccaatttcagaaggggttggcctcaactagaaaaggaagcttctaacgtgagaagaaaagaagaccttctgagaaaacagtccaggcttagcggttccgtgcccaccatttggggctccctcaccacacgatctgggtgactgactgcagacacacctctcctgccatgagcagcacgaacttgctgacctagtcctatcacctgtgtagctggctctaccccggaggctgccaacaccacctttatctcatgctccacattttaatatgtcaacatacacagggactgctgcttactttccagactataagaaccttagtgtggctcacatctgtaatcccagcactttcggaggccgaggtgggcggaacacgaggtcaggagatcgagaccatcctggctaacacggtgaaaccccgtctctactaaaaatacaaaaccaaaattatccgggcatggtggcgggtgcctgtagtcccagctacttgggagactgagacgggagaatggcgtcaacctgggaggcggagcttgcagcaagccgagattgcgccactgcactccagcctgggcgacagagcgagtcttcatttcaaaacaaacaaacaaacattttagtgtgggctgggcgcggtggcttacggctgtaatcccagcactttgggagaccgaggcaggcggatcacgaggtcaaaagattgagaccatcctgaccaacatggtgaaaccctgtgtcaactgaaaatacaaaaattagctgggcgtggtggtgcgcacctgtagtctcagctactctggaggctgaggcaggagaattgcttgaacccaggaggcagaagttgcagtgaactgatatcgcgccactgcactccagcctgggggacagagcgagactccatctcaaaaacaaaaaacaaaaaacaaagccttagtgtgttagcatattataaatattttttcttttctttttttttttttttttttgagatggagtcttgctctgtcacccaggctgcagtgcagtggtgcaattttgccttctcctgggagtggtgcaacctccatctcctgggtttaagtgattctcctgccttagcttcctgagtagctgggatttcaggcgcccacccccatgcctaactaatttttgtactttttttggtagagatggggtttcaccatgttggccaggctggttttgaacctctgaccgcaggtgatccgtccaccttggcctcccaaagtgctgggattacaggcgtgagccaccacacccagccaatattttcaattcaaagttgagaaaatggccacagggagctctaaataagtcattttttatattctctgcttttaagtcaaaagaaggaacagagaagagatgcgtgcagggtgggagcagagcacactggggtcagaatgccaaggaggacttccccatctggaacccacacacagagagcagcggagtgctgatcgatggttacacccctcggcatcttcctctctgtattctatacccattatgcgaagattttgtccacagaaccaccttcgtttactaagcaatgcttgctgcggtttcaaaggtgctcagatccagggcggtgcagcgcttgccagaggccgccctgttccaggatccgttcctcagcttcatgcttaattttgtaaccatcagtcttctagggacttggtgattcaagtgaaataaatcagtaagtgatgaggaaactgaaatatcaattaagtggtaaagagatggaggccaggttagtgagcacagactgagaaaggaatgatctgatccatgagtgaggcgtggatccagcagagccgagcccaccccatcccaccaggacaagtggcaggaaccgcagggaaagctggaaacacaacagctttcttagaaaagacgttggcgcacttacgtggggtggtccagatctcacactcatcatctcagacaacattaagatggtaaaaaagcagtctcgggccgggcacggtggcccatacctgtaatcccagcactttgggaggacgaggcgggcagattacttgaggtcaggagttcgagaccagtcaggccaacatgaaacctcagctaagatacaaaaattagctggacgtggtggtgcacacctgtggtcccagctactcgagagactgaggcttgagaatgtcttgaacctgggaggcggaggatgcagtgagctgagattgtgtcaccgcactccagcctggacgacacagtgagactccgtcagcaccaatgtgttactcccttcagcactttctgtgctcccttttgtgggaggacagcgacaccagcatcactaaaggagctgaattaaatgcagtgcttttgactttggacttacatgcagagagaaagaggagagttgagtaacatgctcagcctgtctctccccaggatgcccatcctctgctgaacctgcccgcaggtttgggagccgctgagtgcactgcagagtgagcgtcagctaccacagtcccttcttgcagggtgttcctagtttaatccttatctgtacttgtgaaatggaaggtttatgccttgctagagagcttttaggtataaggcttgtcaactctaaaatcacactgcagagacctgcagtgtgcctctcccctactgacccacacaggtaggggacagagttggaggccccaagcacagagccctgcctaggcaagacactgccactgctgctcactgtgaagcaacctggggaaccccctgcttccacctgttctgtcccatcagcaggcgtaggggctgctgccatggtctggttctgccccccatcactccaactctgtgcactgcctggcggttgtcaccagtccaggggtctgaccagcgtacccacctctgcctgctcaccttcatagtgcacagccccatttctaagatgatgctcagcgagtgaccgtctatgggaccattcccaaaggcacaggtgcatggggaaccccaagaaatagtgcaataacctgaagctgttaccagccctagacctggggtgaggaacagttacaaaacctggaaggagagagtttcaggtagagccagtccccttgggtggggcagcgaccttcattcgagcagtccagccaggtagcggcagcctcccaggatgagggagctacaggagtaaccacctgcctcctctgggggctcctcactggctaagctcaacaggaccccagaatacgggagcccagccgatgtgtcccacactcagcctccctggtgagaaagacaggtgaggcagggtgaaaatgggacctgggggcaaacaggagctacctgcggcactctaagactgggcagatggaagaaagacagttggggttgacgcagtatcttctacaataacgcctgaaataacttaaactttgttttcagaaattattatttgtaatagcaataaaaggcatgaacatgttttccaaaaataacaacagtgatatacacaggttgagcatcccaaatctgaaaacctgaaatctgaaatgctccaaaatccaaatttttttgagcatccatactacactcaagggaaaagctcatcagagcatttcagattttggatttttgaattaggaatgctcaactggtatgtatgatgcaaatactcaaaaatctgaaaaaatactaaatctgaaacattcccagtcccgagcattttggtttttattttatatatgtttgagatggagtctcgttctgtcacccaggctggagtgcagtggtaggatctaggctcactgcaacctctggcttctgggttcaagtgattctcctgactcagcctcccaagcagctgggattacaggcacccaccaccacgcctggctaatttttgtatttttagtagtgatggggtttcgccacgttggtcaggctggtcttgaactcctgacctcaggtgatctgcccagcttggcctcccaaagtgcttacaggtgtgagccactgtgcccggcagcagtcccaagcattttttttttttttttgagatggagtctcgctctgttgcccaggctggagtgcagtggacgatctcggctcactgcaacctctatctcccgggttcaagcgattctcctgcctcagcctcccaagtagctgggattacaggcgcacaccaccacccctggctaagtttcatatttttggtagagacaggctttcgctatgttggtcaggctggtctcgaacttctgacctcaggtgatccaccttacctccaactcagacacccccgctccagtgaccaactctctggtctcactggagccgaccaggaggtgccccgttcccacggctatgctgagcgccccagccagcactccaacacggcctgtcaggggaggtgacgctgtctccagctgtgtcttgaaggcaggaaaagggattccaggcagaggcctgagcccctcagatctgagggtatcctcaggagctcgcaggggacatggggcaggggctggcaccccatggcgatgggggagcagcagcagggtggcagggaggccatggggtcggttacgttgggcgcttggcatgtgctctgtactactttatcctggaggtgaccagaagccacacaggggctcacacaggaggctgaaaaaatcagggctgcgtggacgctcagtcagaggagaaaagaggcagagcagtcagtggacgtctctgagaccctgctccctccatcgtgactctccgtcccatccctgcgtgctctccttcacctccgcccctcaccagcttgcttcccgctctctctccccatctccacttgaccttgtggtggttcactccactccactgcctttctttcagagcaaacagctcgcagtgatgatctgtggccctaagcccactttgccaggaccgctccagttcagcaccatggaatgggactccacctgggccttctgagtccccatcaccagcaaccacctggcactaatcacaatggcttttctgcaaactccttgccgaccactgatcacttggcactgggctctcagccccagtctcctcacctttacactggaacaaaagagcctcaaaggggccatgtggatccagagggaacctcgagagaggagccgtgtggatctagagggaacctcgagagaggagccgtatggatccagagggaacctcgagagaggagccgtgtggatccagagggaaccccgagacagaagccgtgtggatccagagggaacctcgagacagaagccgtgtggatccagagggaacccccagagaggagctgtgcagatccagagagaaccccgagaaaggagctgttttttgttcctgcattagtttgctaaagacaatggcttccagctccacccatgttcctggaaagggcatgatctcattcttttttatgcctatatagtattccatggtgtatatgtaccacattttctttatccaatccaccactgatgggcatttagtttgattccatgtctttgctattgtgaatagtgctgcaatggacatacacatgcatgtgcctttatggtagaacaatttatattcctttgggtatccacccggtaatgggattgctaggtcaaatggcaggattaaagacttaaatgtaaaattgaaaattataataacctggaagatgacctaggaaataccattctggacatacaaatgggcacagatttcgtgatgaagatgccaaaagcaattgcaacaaaggcaaaaattgacaagtgggatctaagtaaacttaagagcttctgcacggcaaaataaactatcaacagagtgaagagacaacctacagaatgggagaaaatatttacaaaggatgcatccaacaaaggtccaatatccaggatcaataaggaacttaaacaaattgacaagaaaaaatcaaacaacccaattaaaaagtgggcaaaggacatgaatggacatttttcaaaagaagacatacacatggctaacaagaatatgaaaaaaagctcaacactactgctcattagagaaatgcaaatcaaaacccttgattctctaatgatgttgctgcaccttcaacaccactgggaactctgcctgctgcaagccaaatgccctggtctaccatttgcacaccggcagtataaacacaaagcatgattagagcctctgtgtacagaagagagtaactgctcacccacaccagctcctgtagttgtggggccctgacttagtcaattactgacgtcctccttggcaagcaaattttgccactggtcagagggttcattttaacagtgctgtgggtggtgggggcgtgaagcaaaggcggaatgcatgtgtgccttggagggtgcagtggcttctcctcagggtgggcttttggagctgctgtccagctaccaccagagagaggctctgcttggccaggcaggcaacgagggcgggaggaagcaggtgcacatgcatgcacacatgcacatatgcacacaggcacacacacacatgcacacacactcatacacctgataccaagttaaacccctctctcttttatcacgaccactgactattatattttaaaacacatattcaagggaaaatagtggataggaagcaggactggaatgcagctcccactcagacggacagagcagcgtgtggcaacttgcatcatgaacctgtcttccagaactactgcaggaataggccaggaaagctgagagaatccacagacccttgaagaaggcagattgcttctgcaggacccaggagacacaccaaacactgccccgtggcaggctggtccccgccctgcaggagtgtttggactgtgcagtgtgataagcactgtgggtgaagtactgcaaagtgctaaaggaacatacacaggaggagccagaggagccttcacggccaaggggatgtgagctggatcctgaaagaagaagtgtttgagagagaagagaagaagaaacattctaggaagacgtaatagcatatacaaagacagaggtcccaaagaacatggcatgtttgaaaaatgatgtagccgtatcttagcctgaaacagctggagtctagcactcatgggatatggctggagatgcgacaggaaagttactcaggaccagatcgccaagggcctttagaaacgcacactactaggccgggcgcgggggctcacgcctcaaatcccagcactttgggaggccgaggttggcagatcgcctgaggtcaagagtacaagaccagcctgaccaacgtggagaaaccctgtctctactaaaagaatacaaaattagccgggcttggtggtgggtgcctgtaatccaagctatttggggaggctgaggtaggagaatcacttgaacctggaggcggaggttgcagtgagccaagatcacgctgttgcactccagtctggcaacaagagcaagggaaggagcgagggaaggagggagggagggaaagagggagggggggagggagggagggagagagggagggcacattgcttcgtgtagcaccaaggcgtcactagacccgggattcacctgcaaataatccgagtgtggggaagtgggtgagggtgttgatgaaacaaggctgtctcaggaattgatgcattgaaggtggatggtggctatttggaatgcattgaaccattctctctaccatttcatatgtttggaaattttcataatacaattttgaaacaaaaaatatcatcatcttatgcaaggacattctttgttgttacataatattagaatacttttattattgttgttaatagcattgttgagtttttttaaaataatcatgttaacagaaaaaaacccccatattcattaatcacaggtcatagtaacatattcaaaacttgtcttaaagactaagtgtataagaatgaaatgcattttaaaacaaaatttacactgtcccaaacttcacttaaaaactccccaaaccgaaaaaaaccctgactccttattcacaattttaacttaatatgctgaatttcattataattccacaaaaaattatcagtgttaaaatgtatcttttatactttattctgcatttagaaatacaagtttactatatttatatagtgttttctctttttagaaaactgttaaaaaatatctgagtaagaaataagcaaagaagaggaatgtgacagtcaaaagtatatggaagagaaaaaattaaactcataagttggctgggtgcggtggctcatggctgtaatcctagtactttgagaggcaaagatgggagaatcgcttgagctcaggagttcaagaccagcctaggcaacacagtaaaacctcatctctatttaaaaaaataaggtcgggcgtggtggctcatgcctgtaattccaacactttgggaggccgaggcaggcagatcacttgaggtcaggagttcgagatcagcctggccaacatggcgaaaccccatctctactaaaagtacaaaaattagccgggcatggtggtgggtgcctgtaatcccagctactcaggagcctgaggcaggagaatcgcttgaaccgaggaggcggaggctgcagtcagccgagatcatgccactgcactctagcctgggcaataagagcaagactccgtctcaaaataaaataaaataaaataaaataggccgggtgtggtggtggctcatgcctgtaatcccagcactttgggaggccgaagcaggtgggtcatttgaggtcgggagtttgaaaccagcctggtcaacatggtgaaaccccgtctctactaaaaatacaaaaatcagccaggcatggtggtgggcacctgtaatcccagctacttgggaggctgaggcaggagaattgcttgaacctaggaggcggggtttgcagtgagctgagatcgcaccattgcactctagcctggacgacagagagagattccgtctcaaaaaataaaataaaataaaaacccctaagtttttctaaagtgcctagaaacatgaacagaaacaaaggcaaatcttaaacataattttacaggatttacaattataaggtggcagaataaatgaagtctgttactttttttcccctttccatgctttttgcatttggttttgtgtgtgggggcaaatgtgtacacgggcgagaaaatgcacacactcttctaaataagggggcagtaaaagagttattaggaaagaagaaaaagcacaggcaggatcaaggcagagtttgcccaattagttcaaagtgagttgcaatcgatgcctaaggaaagtcacggacaaagcaatgaccttgaaattgtatgtggctcctgtcagaattttaaaatggttttgcatagaattctaggaactattaatacataattaaagcatctaccacagccaatgattcctttctcagggaagaaaacccagtgatgaagctggagaacggtgatggccaaggagagctcacagggatgaagcagcaagcaccagccaggccagaagagtgagacccaccttggcaggtacagtggagcatccataatccaaaaacgtaaaatcccaaatgctccaaaatgcaaaactttccgagtgccaacacaatgccataagttaccctgaacacatcggtttttcactgtatttatcagtagcatagaaatacagagtcaggaacgatggtgatgccagactgtccacaagggtggctgagacagtggcacctttgctttctgatggttcaatctgtacaaactttgtttcatgcacaaagttattaaaaaattgtataaaataacttcagactatgtatataaggtatatatgaaacatgaatttcgtgtttaaaattgagtcctcatccccaagatatctcattatgtatatgcaaatattccaaaatctgaaaaaaatcagaaaaccggctagacgcggtggctcatgcctgtgaaatcctagcactttggaggggccgaggtgggaggatcacctgaggtcaggagttcaagaccagcctggccaacatggcgaaaccccatctctactaaaaatacaaaaattagctgggcatggtggcgcatgcctgtaatcccagctactcgggaggctgaggcaggagaatcacttgaatccaggaggcagaggttgcagtgagccgagatcgcgccactgtactctagcctgggtgacagagcgagactccgtctcaaaaataaaaaataaaaataaaaataaaaataaataaataaatcagaaaacctaaacatttccagttccacgcatttgggagactcaacctgcaccaggaattatacagctgctgcccccgctggctgtcatgaggtatacttttagctacttaaagaagtttcctcatatccctggtttattaacgatttttaaaaaggaacatatgttgaattttattaattgctatttcagtatctactgagatgactaccagtttctctcctttatcaacaacattaattccttaggcaatttcttctttttctttctctctctcattctttctttctttctttagagataggatcacattatgttgcccagactggcctcaaactcctgggctcaagagatcctcctaccatggcctcccaagaagctgggactagatttctcaatagatggctttgtttttttgttttgttttttttttgagataaggtctcactctgttgcccaggctagagtgcagtggcatgatcactgctcactgcaacctcaaatggccaggctcaagcaatcctcctgtctcagcctcctgagtggctgggactacaggcatccgctaccatacctggctaattttttttattgtttgtagagatgggagtctcgctatgttgtccaggctggtcttgaactcctggcttcaagtgatccttccaccttggcctcccaaagtgttgggattacaggtgttagccaccacatccagctccttaatagattaaaaaaatttttttttaattaaaaaaattaaagatggggttttgtcatgttgcccaggttggtctcgaactcctgggctcaagtgattcacccaccttggcttcccaaaggcctgggattacccgatccacccatcttgacttcccaaagggctgggattacctgagccgcccaccttggcctcccaaaggcctgggattaccggcaagagctaccttgcccagcctagatttcttaatcaacagaagaatacttgcatttctaagataaaccttacttgaccacaatatattcggcttttaatcctgcatagctagtgtttgtttaggagctttggccacattttaaatgtaagactgatcgcttgttttcttctttgtgtgctatcttcctctggctttgatttcaagatcaagctagccttacggaaggagctgggaagtgctccatattttcctatgttctaaaataatttaaataaggcattaactgttcctgaaaagttttacagaattcatccataaacaggctgaatagaatggtatgctcttctgtagcagaagaggaataagacctttcattatcttatttaaaaaatagctttgttggggctgggtgcaatagctcacgcctgtaatctcagcacttcgggaggctgatgtggaaggatggcttgagcctaggagttgcagaccaacctgggtgacagagtgagaccctgtcacaaaacaaaacaaaacaaaacaaaaaaccaacaaaaatagtttgagatataattcacattcacaggttcgccaatttaaagtgtaccatctctgttgcccaggctggagtgcagtggtgtgatcctggctctctgccacctccacctcccaggctcaagcaatcctcctatctcagcctcccaagtagttgggaccacaggcgtgcaccaccacacccggatagtttttgtattttttttgttgagatggggtttcgccatggtgcccaggctggtcttgaactgctgggctcaagggatcctcccacttcagtctcccgaagtgctgggattacaggcgtgaaccaccatgcccggccggtgtgctttgatcaacgttacttttaaagatctctgcatttatagttaagaagcttctcttctttctaaagctttgcattttctcccattttttcctgaacagacttgacaaaggtttatccactttactgacttatccaagaactaagtttttgtttttattaagcatgactacctttgtagttgatttcactgatctatgtcatttcagtagactttaggagggaagagaggtaagtgaatatattcagcaaaccgctgagtcacaagagtggcagagcaatttggtgaattcattctgatgaattcaagatgggcacttcatccaagtccccgcaagtgtcctgaagtttgagactctgacaaaaggctatcctaactcacaatgaaacactggagtttcgcagagattacacatacgtccataaatgtgtgcacctctttggggttttgcaatataatggatctttctgttgtgcgtcctctgacagtttctactatggcgtgccattgtttttacactgtgtgacagcactgacaagaattactactgcaaatcaaaacacaaaaaaaccattggcagagccattacaataagtcaccaatagaagatgtcaggtagcaagccagtgttcaccaatggggactactcaaggtactcccagttcaaatgggaggcaatggagaagacagaagcatctagaccaaccctaggtcagaattgttactgcctttcttgtgagcttgaacaaattgatacccttgagcctgaatttcttcatttgtaaaatggtgacacaccatctttcctgagagcatttctcaggaacagggataagcacaaacatccaatcgcaaaagctgccaactatatgtggcatacatacctgtgtccacatggggcaaagtctgacagtgcagaagaacagaatcgctggaatcactttaaatttttgctcggtttcttcttgtcttcctagtcatcatcgcagttactgctgatggagactgtactacatcccaggccctctaatgcagcggtccccatactacatcccaggccctctaatgcagtggtccccaacctttttgggagggaccagtttcatggaagacaatttttccatggatgggggagcagggggatggtttcagcatgaaattgttccacctcagatcatttggcatgagttagagtctcataaggaaggctgggcacggtggctcacgcctgtaatcccagcactttgggaggctgaggcaggcagatcacgaggtcaggagtttgagaccagcctggccaacatggtaaaaccccgtctctacaaaaatacaaaaattggttgggcatggtggcaagtgtctgtaatcccagttacttgagaggctgaggcaggagaatcgctggaacctgggaggtggagcttgcagtgagccgagattgcgccactgcactccagcctgggcaacagagcaagactctgtctcaaaaaaaaaaaaaaaaaaaaaaaaaaaagctcataaagagtgtgcaacctagatcccttgcttgtgcagttcacaatagggttcgcgctcctatgagaatctaatgctgctgttgatctgataggaggcggagctcgggaggtaatgctcgctcgcctgctgctcacctgccgtgtgggccgattcctaacagtagtggtctgtggctagggggttggggacccctgctctagtggatatcatgcccatgttatttaatccacatataatcctcctggctaggtactattattatttccaagttacatatgaagaaaccaaagctttaagaaacttactaaagttctcacagttattaagtagaagaaatgagactctaaggtgaatctgactcatgctcttaattgctatggctctaattacacatgcattaaaaaaaggggggttacatcgtatgtatgtataagcttcaaagctagagaagtcaacgtgaagactgagagccaaggaaagagggtaaataagcgtcttacaatgcgcatgtgtgtactggggaggaggtcttgacggaacaatgaaacattccacttccaagaaaatgtggaaaatgattcataaaataacaacttattgctagcaacttcctgtcagttacaaatgaccaaagtacaacctaaaataaaatgaatcagttagcatgatgttcagaaacctcattgatgttatataaattcagatacatgggaaacagctccaagtgggacagaaggcagcgtgtgtgtgtgtgtgtgtgtgtgtgtgtgtacatatatatatattttttttttcagataaggtcttgctctgttgccccagctagaatgcagtgatgccctcatggttcagcacagcctcaacctcctggactcaggaggcatgggactcacctcccatgtctggctaattttctgtattatttatttatttttatagagagagggtttcgccatgttgcccaggccgatctcgaactcctggactcaaatgatccatccaccttggcctcccaaagtgctgggattacggggtgagccacagcacccggccgtggcagcatattaaacagattaaaaagtgactaaaatttagccaaaaggttcccagactagttcccttcccccaaaatcgctcttcccttttcatatcagagatgaacctggctctgttccccctaaccttagcacaagtgtaatcacggccatgaaaggaaggtgtcaaggcgatttcctcggatgccagattccgcaggcgagccatcccactctacccacttgctactgccttcagttattcaactgcaaacgtcacaagccctgatgtcacccaccgtcgggtggagaagcctttcacacctccagggttcactcagtcatttcacttcctccgttgctccgccctcactgctctttgattagcgcaccatcaacatggcaaatgcaattcctctcatttctccaatgcctcaaatagaaatgccttatgtctttgtaagaaataacattgaccacctgaagtatggcaagcctaggtgccacagtaaaagcataagctccaaaatacatacgttcatttgtgtgacaaatgtttactgaaaaccaagtttcactcatcccagtggcctcaagacctggcaaatattaagatttcagtctccatcctcacagagcttacaatgtaatggcaaataaatgggaggggctactgggaaacacaaagaagtgcgtccccctaacagcacctatcaattgtgagggatcatgagatagcatgggaagtcttcatcggggcttctgggaaggcttccctgaggaagcgacatctaacctgagacttggagaaaacgagcaggtggccaaaggagaggaaggaatgattcaaggagcaggagctgtctgtgtaaagtctggcaggcctggaggagcaaggcagtttgaggaagctgatgaaggccagagtagctggagggaaatgcagggaggaaagaggcaccaggtgaggctggggagggaggagaagggggcaaggagggcgtgccgggaagtgcggactcctacaggcaaaggaaaagtaccggaggctttagaaatgaaagcgatgggattagaaatatgtttgaaggaaatatctccaacagcagcatggcaaattaattggagggggcagagcaggtgctgggagagcttggctgctggaacggtccataggaagatgacactggccgggagtgagggagagaggtgaacaagccggaagcagcagcaaggagctgttctcttggacctggagtcaagcagctttcctgttaaaacagctgggaggatgcgggcatttatggaatcaggctggttaaaaagaaagaaaacaaaccgaagaaggaaggggaaggaaggagatgggcacagagagatcagtgtcaggggaatctgagccgtggaggagggcacgacctccaggctgaaggcacaggatgagatgtaggcctcagacagggcagcgagaagcccatatccagtgctccaggagggaggggaatcgtatgggatgtgagttatatcacaggggtccgaagcatgggtaaggactcagcacagctggctgtggggttggagctgaacagctgtagggccaagaggccattcttcaacacatccaccaggaagcagagaaagttctgagatgggaggtcacatggccctagagcaatggccagaggtgctcaatgccctgggccctgatgactttccagctggttccagttacttgcgaagactggtgacgagtcccacttaccaatacccccgaatcctcccagcattgtcctctgcttaaactagtcagggatcttccggtgacaaaacctctatctactccaagacaacaaccctacctcaccaagtcggagacaccaccaaatgtgaagtcacgtcctgacttcagagatactgaaatgtgtacctagaccctacagaatagggcaatatgttacatatggcgccagctccagaggaacaactttaattacagggatttcatacaattgtaactactcataatccagaaacaataagtctcttatctacgaggagtgtgtgaactcagcagggaagggtagagtttggaaagcagataatcacccgagccttctcgtgccctaagtaatgatcgacaagtaccagactgtgcccacacacctgccactttgatatctccaccagcagaggtcagtgccccgcagtagagtcaagaaacctgcaagttgacgcttggctgtgagagtcaagggacaagggaataattcaatagatgaccacaaatacacagggaggcaattctcccttaagcaagttccagcagcttctaagccttgttttcattatactcccctccctgagtcttttttatacattctcccccaactgtcctacccccacgacattttaatagcacagatatactgtgtatttgttcatgtgccgtggccctttgggtggccaaaatccactgtaacagctgcaatttttttgtctcccaacaagaaccgatcttcacttactcagggtgttactcactccagttgagaatgaatgagttttgagtgaacacacatttttgttttgtttatttgtaaagagtgattattggttgctttggggtctgatttttaagcgagagagaaaaagcaaaagatcaccaagtgccggccccctggttttatagagaaaactcttaacgacagcaataacaacaaaacaaagcccggagaggcctcacgggttgtccaaggaaatacaggcccttcatcacagatctgggcctgaatcccgagatgcctcactgaaagacaatgctttctttccctcctacgaaaagtggcccctacttttacctattttgatcactgtaggtgaggctgaccagttttgctagaaacaagcaagattggctgggtgcagtggctcacacctataatcccagcactttgggaggccgaggcaggcagatcgcttgaggccaggagttcgagaccagcctgggcaccatggtgaaaccccatctctactaaaaatacaaaaattagccaggcatgctggtgcatgcctgtaatcctagctactcaggaggctgaggcatgagaattacttgagcctgggaggcagaggttgccgtgaaccgagattgtaccactgcactccagcctgggcaacagagcgagacaaaaataaaaagagagaaaaataaagcaagattgaggcacgttctggaaagaagattctatttcgttgttgtcattttgtttttgttttttggagacatgaaattactccaggctgaagtacagtggtgcaaccacatgcgctcgggtgatcctcccacctcagcctcccaagtagccggaaccacaggcgtgcaccaccatgcctagctaatttttaaaattttttataaagacggggtctcaccatgtttcccaggctggtcttgaactcctggccttaagcaatcttcctgcctctgcctcccaaagtgctgggattacaatggtgagccgccacgcccggcctggattctactttggaaaatctttgcaagtgaagaagaataggacagaatggctgaactgggatgaaataagcggcaaatgaggaggaagaggagagacagtcagtctggcaagacactctctgctaagaagcgggtaaaatcaccacagcaagttatcaaaaacttgaaagagcccagctcctccggcagctgggagagaatgcggaccgctctaaagaggctgcagacttcatgaagtggtaccagagtagagcaggtttattaatcacggataaaactgctgaataattacctacttcaaaaagcattcatgagttgtgtttaggtgcttacaaagtactttgtgcttggtcctggccagtaagttagttcaaggcagttaatatagataaacacaaacacagcaaagacgtggtcggtgtaacaattacaaatgtaaaaagcaaacacagaaagggattgctggctgggcaccgtggttcatgcctgtaggtcccagtagttagggagactgcagccggcagatcacttgagcccaggagtttgagaccagcttggccatcatagtgaaaccccatctctactaaagtacaaaaattagccaggcatggtggcatgcgcctgtagtcccagctacttgggaggcggaagcaccacttgagcccaggaggttgaggctgcagtgagctgagatcgcatcactgtacttcaccccaggtaagagtgagaccctgagggagggagggagggaaaaattgctatgggcaaggcttctcatacacaaaatcatttcctcccccaatatgcccacaaagtaactacaaacacttaatgaaatcattgagatccaaagcactgctgagaacttgctatgtgccagctgtggtagcaggcacgggggagagaaaggtgaatgccagagaagtacagagggtattcagagaaggcctcggagaccagatgagacttgagctgagccttgaagtcttactaagatcggtgtggcatggaaagcatgcagccctcatcacgtgccaccccctaaggcacaggcacagtgagggagacacagagcagggggctggcacactatgcctgagggccaaatctgggttttggtaaagaagttttactggagccgagccccgccccttggattgtgttagctgctttctgctttcttgctacaagggcaaattgagtggttgtgacagaaactgagaccataacacccgcaaaggctaaaatatttactatctgaccctttacagaaaaagttggccggcccatgtcctgttattccaagaggggtctgtgaaccggcagcaggagcggcccctgtgctaggcaagtcccaccccagacctagagaactggaatctgcctttcaaaaagatctgtggctattcttatgcacagagagggaggggcactgagcctgcggagtaagagaagtctgcacctgtcggatatacggacagaggaacgtggtcaagaccttcccatagaggagtgaggccatcaaacccacccgtaccatgtccctcttgtcgtggtaagaagggttgacagcagaaaagggatggcagctcctgtcataacccaggccaaagacgacccaactaggcagggtagaactcaatctttcttcctaacctcaccagtgcttccaagatgtttctaacaaatatagtatcagttataacttattaggaaatagaaaaatcttggtaatgaaaatatgagtaatcatgtgtttccacgtacagcgaatatatctcggttgaagcaatgcctctagacatcaatgcatacatgaagacgttaacagggtatgctggatgctgaaagatgaaatgaggatctcgtcaagggctccctattatgtaggatatttagaggtgtaatgtcttactgctgggacttttgtccctgctaaataagtgtgagattctgcttgatattcaattttcctgtattttggatgaataagcaatttaaagttcaaaagaaacaaagctgcatttggactaccacgccaacactgttctttcttccagctcagctcagcctcaaagtcactgtttaacattctgcctccttaagaatctagaaaagtttgacagggttattcgtgggattcggtgtgctttaaaggaatgacagcaatatagataaaaatagatgggtgaagaggggaaattcctctcttagacacttaggtttaatactttacattcattacattggcagacacaatgaaaagaaaaaaaagagtgtatatctgcttagagaaatgcataattaaattaataaatctcaagtaagaagaagaaaagggacaggacaccaaatctgtgttgagaagaatctctgtgttgggtttcattaataaaaatcttaaaaagctcatgaattcagtacaatgcttaatggcacttaagcgataatagtaactaacatttatgaagtactcactatgggtttacactgtttttaaatgccatgatacggattggctcatttaatcctcaaaacacctgatattagctctattttagaaatgagaaaaccaaggcacagagaggttaagtaacttgtccaaggtcacacagctaaataagtagtagcgattcctctcgaacagaagctgctctctagttcttcttgcctccctgctaatttgcaaaaattgtaactgtaaaagactctcattcttactaatataagagacaaaaccctggtgatttagacattcaaagtcttatggaacgggcacaccattccaccctgtggacagcggccaagatttggcctgcaatataataaaactgaggaatagtgagatgggttcgaatgaagaccctggattatttttctgtaggatgaaatgcaaattaagtccggtaaaattctgaaatgcaccatttgttaccaataaatacagacaaacacttttaatgacaatgactatgaacgcgttctcttccagctaacatgtttgtgaaatgctgcagtgaatctcaaagataacaggcacccggctaattctattgggttaacacgtccatgctggctgtgcaggcttatttaagtaattgcctgactgtgaatgaacagaggtattaaagtaaagttggcacaagggacagcatccacatggcacgttctttgtttcgagagctttattctatcaatactcctggaaaaaagagaagttgctaaataaataatggaagcacacaagacagtgtgaacgccttttcaagtcctcgaattgtcaagcatcttatataaagttctttcccgactctgagctcatcacatttcattttacatattaattttgcgtaagagcaagctcatcccgttcaaatgttaacagcttcaaaataagatcctggtgaaagctcgtcacattccattttaaatattaattttgccaaagaacgagctcatgcctttcaaatgttaacagcctccaaataagatccaagttatttacctgtaagatacaagaagaagacaggagagggaaaaaaaacaaccaagtgagaggagaggcgacagaaatgacggagtgagagggtcgcctgaactcaacaccgattcaataacctcttcaggttttcctatttaactttccccattaaaaaagaagacacaccctaccggtcatatcttcacaggcgcagataagggcaccagtctatgattaaagggtctggactgtgggtatgattcggggttgcctccgagtgcatggtgacaagcacaaacaattagcgctccctgacaccttgctgtaattcgagttcggcgagtaaggacaaaagggccgcccgtccgtgtggatgccgggctcagggctgcgctctgggagcctggctcgcgtcccctccgcggacgcccggtaccccgcagcccgagctcgccggcgcccgcatccccgccccggttcccgccccggcccctgggcttccgcaggacgcagctcgccgtggggcagcgccggagatggggcgcggggtccccgcgggtcccggtcctcgggcggccgggccgtgggagcgccgggccggcagcgggcggggcgcactcaccttcgtcctcgaactccagcttctccagcatgccggcttccgcgggtcccagggccgccgccagcgccgcctgagggggaggaggaggacagcgatcagcatgagctgcgacgctcgtccccggccggcgggctcgcggccggccgagcgctggggcctggctctgccgcgccgccgggaggaggggcctggcaggggacgcgggcagcgggggccgggggcggagcgggagcgctgcccccacccgcccgaggccgccgccgccgccgcaggtggcgcggccgcggcccgcgtgcccctccgcgagtgggacgcgccgctcccccccgcgccttggtacggcccgcccgggaggaagcgtgggaagggacccgggagctcgagggcggcagcgcctgggcccggggcgcccccctccggccgtggcccgcgtcctccccgccgtgccgccattgggagaggcccgcggcccgcccccactccgccccccggcgccgctcaccttcccagcaccggcggccgcgctcggcaggctccacctgcgcaggtgtgggctccgcggcgcggggagggggagaggggctggaggctgcagaacgccccggggcgccagctaggggatcctttctcgctttcctcttccctttccaaattttagatgtaactgcccatcctcggcccccttaacaaaaatcgttccgtgggctacacgtattgtagatgcactttgtcgctatccatttttttttttccagcatggaactcttaattcgcgtcctctcttcgcagccgagtgtcttctcggttggggagccgctgccaaaaacgtacacaccctgaatctggccctggccgctcaggagctgggtatctgagactctactatggccaactcaggttggcaggctgcgcggccagcagccgctagcctcctggaagggcaggacaggccgagaggggactgaggtccctggccccacggcccatccctgcagagtgcacgggcgccgcgaatgcgattagctccagtaccgattagggctgaaaggagcttggccctagcgctcttgcaagccgggcctgaaagaggaagtcctgaaaatgcctctcgtttagctttgtcatcttacttgcgccaatccctaagtcttaaacctcttaaaaaaagaaaaggggtggggagagaaaaagaaaacaaaactaagatgtttcatggtaaaaagctacagcagataccatacttcatagtgaaagactgttttccctatgaagttcagaaaccaggccagggtgtctgctctcactaatcctattcaacatggttctagaagtactaggccctgcaataaggcaagaaaaggaaagaaaacgcatacagattggaaaggaagaaaaacacctgtgtagataacatgttatctacatacaaaatatcaaagaatctacaaaagaaagaaaaaactcacctggaattagtgagtttggtaaggtcatagcatacaagatcaacacacaaaaatcaatcacatttctataaactaacaatgaacacatggaaaaatatataaaacaatatcacttaatacaatcacttcaaagaaaattaatacttaggcataaactcaagaaaccatgtatagtagctgtatgctgaaaatcacaaactgtagatgaaagacgagctaataaatggagagacagtcctgagctggaagccccaacatagtaaaaatgacaattctcccccagattaatcttttggtttaatgcaattgctaccaaattagggttttttttaaagacataaataagcttattctaaaatttatatggaaaggtgcaagctctagaattctatttatttatttattatttttttgagacggagtctcgctctgtcacccaggctggagtgcagtggcgcaacctcggctcactgcaagctctgcttcctgggttcacgccattctcctgcctcagcctcccaagtagctgggactacagtagaattctttaatcttgaagtcgcttaatattaaagcaaactatatagatacagcaatcaagacaatggtattggcagaagaatggatataataatcaatagaaataaatagaaaacccagaaatagacccatgcaaacatggcaaaccaatttttgatggaggtgtaaaagcaatagaactggagtaattggatatcaaaaggtaaaaagacaaaaacaaaccccaacctaagccttgcgttttacacaaaaattagctcacattggatcgtgaacttaaaactatgaaactttttggagaaaatatttgggaactggggcaaggcaaaagttagacttgacaccaaaaacacagtccataaaaggaaaaacataaatggacctcattaaaattaagaatttttgctctgcgaaagaccctgttaagaggatgaaaagaaaagctacacagtaggagaaaatacttgcaaatcacatagccaacaaattactagcacactgcctatagggttagccctgctctccaaggaatagcaaaaataaaataaaataaaaatgtctggaatacataaacactaccaatattaaacagaaaatggagaaaataatccaattagaacataggcaaatgacacagagctgtttcaccaagaaagatatacagatggcaaattagtgcatgaaaagatgttcaaagtcattagccattatataaatgcgaattaaaaccacaatgagatactactacacaactgttaaaatggctaaaatcacaatagtaacaacatcaaatgctggtaaggatgtagagagacagacaggattacttctacactgctggtgggaatgcaaaatggaaccactgtttttttttttttttttcttttttttttgagacagggtctccctctgtggcccaggctggagcgcagtggacctatctcaactcactgcaacctctacctcccaggttcaggcaattttcctgtctcagcctcctgagtagctaggattacaggcacatgctaccacaggtcagctaatttttgtatttttagtagagatgaggtttcaccatattggtcaggctggtcttgaactcccgacctcaggtgatctgcctgccttggcctcccaaagtgctgggattacaggcgtgagccactgtgcctggtcaggaaccaccactcttaaaaacaatttggcagttttttataaaactaaacatgcaactaccatgtaacacatcagttacactcttgggcatttatcccagggaaatgaaaacttacatttacacaaaaacttgtacatgaatattcatagcagcttttttgcaacagtgcaaacgaaataacagatgtcgttcaatggatgaatggtgaagcgggctgtggtaggtccatctataccgtaaaatactactcagcaagaaaaaggaaggaactactgacacatacaacaacttggatagatctccagggaattatgctgagggggaaaaagccagtcctaaaacgtcatatactgtatgattccatttatattatagtcttgaaataaaatggtcgaaatggagaacagattagtggatgccggggatcaggggctggggtagggggccagaggtgcctatggctataagaggataatgtaagagatccttgtggtgaccgaactgttctacatcttgactgtatcaatgtcaatatcctgcttgtgatatcaccctgtatttttccctatgagtcaggccaagctgatttaattctgtggaggaaatgacaataaatttttttttttttttttttgagacggagtctcgctttgtcccccaggctggagtgcagtggtgccatctcagctcactgccagctccacctcccgggttcacgccattctcctgccttagcctccggagtagctaggactacaggctaattttttgtattttttttagtagagactgggtttcaccgtgttagccaagatggtctcgatctcctgacctcgtgatccacccgcctcagactcccaaagtgctgggattacaggcatgagccaccgcgcccagccaaaaaaatctttactgaaatataattcacataccataaaataactcacccatttaaagtgtgcagcccagtgatttttggaatattcagaattgtgcaactatctaagtttacattttcatcatcccaaagagacagcttgtacccattagcagtcacgtcccattacctgctcaaccctcacacccatccctaggcaactatttcctgtctctatggatttgccgatgctgggtatttctcatcaatgggatcatacaataggtggtcttttgtgactagcttccgcttaatgtcagggcccattcacattgtaacacggatcagcacttcatttctgttgactgctgaacgatactctgttgtgtggacacacacaccttgtttatcctttcgtcagctgatgggcactcaggtggtttccactttttggctgtggtgaaaatgctcctatggacattcctgtgcaagtgtttgtgtggacatgtgtttcatttcatatatacaggagtggaattgctgggccacagggtaaccctatgtttaatatatatatattttaaatttagttttgaaatggagtctcactctgtcacccaggctggagtgcagtagcgcgatttcagctcactgcaacctctgcctcctgggttcaagtgattctcctgcctcagcctcccgagtagctgggactacaggtgcgcacaaccatgctcggctaattttcatatttttagtagagatggggtttcaccatgttggccaggttggtctcgaactcctgacctcaggtgatccacccgcctcagcctcccaaagtgctgggattacaggcatgagccaccacacctggcctctctacatttaatattttgaggacctgctgaactgttttcaaggtggctgcaccattttacatttttaccagcaatgtatgaggattcaagtttctcctgtactgtttagttttgcaagatgttaccactgcggggaactaggtaaagggtgcacaggatctctctgcattatttcttacaactatatgtgaatatacaattatctcaaaataaaaagtttaatttttaaaaaaagttttttaaaaaaacttggagtgagccaaggtacacaggaagtatctctcgttctaagtctatgcttttgtctcttgcaataatttaaaaaaattcttaccggtgtttatgataagcaccatcaatttcacctgtaatcgtgaggggttgttttttgggaggcagaaatgggcaacaaatggcagtatgtacgtcaggaggaccgcaaaagtggttcacagactgaaaagacctataaaccatcactacagaagttggtagagagtagaaattctaacaattaatgttttatgcaactccacttgataatgaatgggtgtacaggagtagcctaaaataaaaatgtttttatgtaatatgctagtgggattgaatttatttctacaggttttttacttagtaagaaatcttatgttttcttccttagaaaggaggctactcatggaacaacagaaaaagtcatgaggttttttttttttttttataacacactaagtcaatttcaggaatttgagggcttttacagtttaggtatgtacattaatgtgcacagggtcaaaagacagacgaatttgtcagcacacagaacttgaagctggtggtcgtcgttgcccttttatggcaatgttttcttaaagtctcaacagacttatgccagacttaattttagctgtttcaggcaggcagggaaagccgggagaagaggcgaagggaggggaagggcgtgggcaatgtcatgcaagcaaagggaaggggcgtgcacttgtgacaccgactcctctctcagtccatcagcatcagggatgtttgatgtagcaaaaacagaccaaatccaccacccaaaccctcctgataatccagaccgatctccccagggagaacaaaatgggccaaccatggcagggaggaactgggttctgctaacagcctggcacagttccaccacagggaacatttccatttatatcacatcagccagtctgaggttactggactctagtgtggtgggagggaacagagggacccaagttggactttatggagagaatgcctgagaaacatggagccatcacaagtgtgacttcttggttggtaaaaaatgctaaattattatcccggcatggtggctcatgcctgtaatcccagcactttgggaggccgaggcgggcggatcacaaggtcaggagatcgagaccatcctggccaacatggtgaaaaccccgtctctactaaaaatacaaaaattagccgggcatggttgcgcacacctgtagtcccagctactcgggaggctgaggcaggagaatcgcttgaacccaggaggcggaacttggagtgagccaagattgcaccactgcactccagcttggcgacagagtgagactctgtctcaaaaaaaaaagctaaattattaagttgtgtcttacataattgtgcccaggtgcagcaaaacactgtattttgaatgactatcagaagggaaaacttcagcctgaaaacttaatcataaaacaattgccaaaaaagcactcctttacgcacagaggtcggatatgagtttgctctgcctcttaaaagaagtcttaaatagctcctgcaagaaataaatcaacctcaaatactgggtaaggagctcctgaataatttagcatacagaactcttagtttctgtgcatcctgctgtcttccttgagctccactctgctctgcaagggcgtcctccaaagagtaaagaacgacgtgaaaccccctggatgctggacaggagctgcacatgcactctgctcccgttcccactgggcattctccaggcagctccaacccaccactgtgcctgacatgtccaggtctcagtcccagcccagccctctcctgagctccacactgccatcatctccactggagttttctacaccaacgcagatgcacttcatctaaaactgtgccccagtcctctgggtcttgccgtcttggtttcttttgagacaacccacttgtctccatccctgctacacctcccctgtttcaggcttccattttctcagggttggccagccgggcagcttgagctcctccagtcttgcccgctttccagtctatttccttccgtgtagccagagtgcctatgatggttaaatttgaatccagtcatcttgactggattaaggaacacctagacaaccggtaaagcattatttctgggtgtgtccgtgcaggagtttccagagactggcatgtgggtcagtggactgagtggggaagatctgcctccagtgtgggcgggcgccatctaattagctgggggcctggagagaacaataaaggtgacagaggatttccttgctctttctcctggagctgggacactttcctcttcctgctcttgggcatcagaactccaggctctcctgccttgacactgggacttaacagcagcagccctctggttttcaggcctttggccttggactgagaattacgccactggcttctctagttctgaggctttcagacttggactgagccacgctaccattacctgcatcccagggactccagcttggagatggcctgttgtgggacttctcagcctccataatcccatgaggcaattcccccaataaatcccctctcatccatctatcagtcagtcaatcaatcaatcaatcaatcatctattatctatctacctacctccatccgtttctatcatctatctatcacctattggctctgtctctctgaagaaccctgactgataagagtgacattttaaaaatgtagtcttggccaggcacagtggctcacatgtgtaatcccagcactttgggaggacgaggcaggtggatcacctgaggtcaggagttcaagaccagcctgggcaacatggtgaaacaatgtctctatgaaaaaaacaaaaattagccgggtatggggcatgcacctgtaattccagctacttgggaggctgagacacaagaattgtttgaacctgggaggcggaggttgcagtaaactgagatcctgccactgcactcttgcctgagtgacagagtgagactctgtctcaacaaaaacaaaaacaaaacagacttattattcactaacttagaaccattcagtggctctcggcaatctttaggattttcttggcaaactcctgagctggggggaagggcctgatcatttattcaccttctcttgccatgtccctctgtgtaccccacacctaaaccttaaggcattgtcctggaatagaccatacactccctgctgtaagggtttctgagcattctggcctccttgtttcttcctcctttccttggccagttcttactatttttaaagattcagatcaatctttctctgaaagcctttcccgattcttttctttcagtctgcttttcctccttcccccaccgccttccttccttccttccttccccgattcacgaccttttctcacaacttgcctggttaattacttctctgaacccacatgcttccatatggcatttaacacactggcttgggatttacttttctgtttcctctgagtcccacattgctctctgaagggaacgaatgactcatcatccttgtattgcctgtgtgtgacacatagtaggcattcaaaaaatatttgagtgaaatgaattgttcattcagacatccattaaaacttggtagggaaacagttgattttagtagcataaatgggtttagaagttatttcactcaatttactcatgcttcccttggacctcattgctgtttggaaatcattatagtcactttccctttagtgttggaattaacattttgaaggaaaaaaagtgactgtgccaagaaatgatggcagggtagtttttattgtaatagattctatctgaggaccaaagttcgctggcagtatgagatcctggcatggatactggctgagagctttgccagctcttgccaccaccctacaatttcagcttttttgttcccttcttttttccttttttttttttttttttttttgagatggagtctcgctctgttgccaggctggagtgcagtggcacgatctcggctcactgcaatctccacctccctggttcaagtgattcccctgcctcagcctcccaagtagctgggactacaggcgcacaccaccacacccagcaaattttttgtattttagtagagacaaggtttcaccatgttggccaggctggtctgaaactcttgacctcaagtgatccacccacctcagcctcccaaagtgctgggatgacaggcaggagccaccagaaccggccctttctttcttttttaagagactgggtcttgctctgtcacctaggctggtgcagtggcacaatcatagctcactgtaaccttgaactcctgggctcaagtgattttcccatctcagcctcccaagtacctgggagtgccagcacgtgccaccatacctggctaatgttgcccaggctggtctgaaactccagtgctcaagtgatcctcttgcctcagcctcccaaagcactgggattataggcatgagtgacatcacctggccaattttagtttctgttaagggaagacaattgatttttaaaagtagtgtagaaatttgaaaaaaatctcaaatatatattcaacactatgagtattaattcttggccacatgcagtagctcggtctgtaatcctagcatgttgggaggttgaggtgggaggatcacttgagcccaggagtttgagaccagcctgggcaacatagggagaccccatctttaaaaaaaaaaaaaaaaaaaaaaaggggccaggcgtggtggctcacacctataatcccagcactttgggaggccgaggcgggtggatcacgaggtcaggagatcgagaccatcctggctaacacggtgaaacactgtctctgctaaaaatacagaaaaaaaaaaaattagccaggcatggtggcaggcacctgtagtcccagctactcaggaggctgaggcaggagaatggtgtgaacatgggaagcagagcttgcagtgagccaagatcgcgccactgcactccagcctgggcgacagagcgagactccatctcaaacaaacaaacaacaaacaaacaaaacaaaaggtagctgggcatagtggctcatgcctgtagtcccagctagctacacaggaggctgaggtgggaggactgcttgactccacgagttcaaggctgcagtgagctgtgatcacaccactgccctccaacccgggcaacaaactgagaccaccccactccccaaaaagaagtgtattaattctgctgattgcttttaatcaatatatttggagagaaggttttgttcattttgacagctttctgaataacaatttcagatgctataaatattagttcctccctaacattcatgatttctttaaagataatttattccacagtatcttttcagagagagtagcaaccaatttgtccagctcaagtcagctgaaaacctgtttcaaaggaagtattgttaaacaaaaggtgaagaaaattgattaacccaaaaagtcctttggattctctatgttaaattatcttcgaatttccaaaataggagacaatggtaagcttttgaagacagtcattcattcagcaaatacttacttaatatgggctatgtgcccagaaccagggtagttggttaataaaatatctgttgaacgaacatgtgctagcatgactagaaattggcatagaagatatgaagaaggagctcaaggaacatggagaatcagcatgattgccttgctacccttcaaattcattcgttacagtctgaaatgcatacatctcttgcctttcacaaataaatccatttttttgccaatcaaaatattttattattagctttgtgtttaacatgagttattgggagcggaatatttatattctcttataggttgataactcttagtattgtcttataatacattgcaaataaaaaaataagtaatgctcaccaagttcatctaacctttcaattcttaatgcagccaagtcacaaactttgaaatatgttgtatttatattagaatgcaatgtacagaatgatatagtgtcacaaggcagtctctgttttctattctctgctccctcccctgcaactgacctattcattaaccctttctagaacagatcactgttaactgtttttcagcccctttaaatcccatattgggtggaagctctattcctaaattggtgaaaaattacaaacatgattgagacagactacttccacttcagttctgctctacataacgtgatcaaaaggaagtacaatattccagctgaaattaaagggacccactaatgcctccaccacatcttctacattctggagacttcagtggtcttcatttactatccacagtgttacatagccacttatggtggattagagtgaactgcagacacagagccaaggaaatggagaagcaggaccttcatacctcataatgcaaatcctttaaagaatgatttgtagtgtccctttttgttgtgtgtaatttaccaacaataaacgatttctattccaagtgtacaatttgatgagctaggatgaaatcatcagtacaattatacgatggaatactattcagtcataaaaagcaataaattaacagcatttgcaatgacctggataagactagagactattattccaagtgaagtaattcaggaatggaaaacgaaacattgtgtgttctcactgatatgtgggagctaagctatgaggacgcaaaggcataagaatgatacaatagactgtggggacttggagggaagagcggaagcggggcaagggataaaagactacaaacatggtgcagagtatactgctcgggtgatggatgcaccaggatcttacaaatctccactaaataacttactcatgtaagttcatgtaaccaaataccacctgtatgccaataacttatggaaaaataaaatttaaaaagtaaataaatgttaaagagaaaattaaaaaaataaaatatagagaaaatttttttatcactccaaaagtttgctcatgctcctttgtggttcaccccttcttcaaggcaaccactgatctactttttatcactatgtcactataaatatttcctagaattttgtgtatatggaatcatacagtatatgtgcttttgctcctggattatttcacttagcataattattttgccattcattcatgtcgctcagtataccagtagtttgttcatttctattgctaagtagcatcccattctatggatagaccccattttgtctattcattcaccagttgatggacatgtgggatattttcactttttgaccattgggaataaagctgtgaacatgtgtggtcaagtctttgtaggaacatgctttcatttctcttgggcaaataccaaggagtagaatggctgagtcatttggtaggtgtgtgtttaatatgagaaaccacccatttcacagactggctgtaccattttacatttctgcccaaagtggttgagagttccagttgcttcatgtcctcatcaatgcttggtatggtctcttaacattttttatcattttagtcattctagtgggtgtataggtttcttgctgtgagtttaatttgcatttccttgaggacaatatctttttgtgtttattggtaattaatgtgttttcttttgtgaagtgactgtacacatcttttgtctatttatttattagagtttttgttcttattgagttgtatgaatatggcaagcagactctgagatggcccccaatgcatgatccccacctcctggcattcatgtacttgtgtatccctcttcttgagtgtgagcaggacctagtgacttacttctagccaacagtattcagcacaggtgatgggacaccacttccattattaagcttctgtctatatacataagactgtggcttgtctttctagcagatcactatcttgctggctttggtgaagcaagctgccatgcgggagaggcccatgtcaatgaactaaggctctcagtctaaccgcttgcaaggaactaaacactgccactaaccacatgagcttggaaagggatccttccccagctgagccttcggatgagaccctggtcctggccaacatcttgattgcaagcttcacaaaagagcctgaggcagaggactcaactaagctgtacctgaacttctgacctacagaagctatgagataatcaatgcatgatttcagccactaagtttgtggtaatctcttacacaactagataatacaatgggttttaaaaaaatgcatttaggatgtaagtcctttgtcagacacatgtactgtgaatagtgaatattttctctccttctgtggcttgccttttcatattcctagtcatgtctttcaaagagcaagtttttaattttgataagatcctatttattatattatgactcatgctttttctgtcctagctaagaaatctttgcctcctcttcttccaaggttgtgaggattgtcttaaatgtttccttctagaagttttacattttccttttactaggcctaggatccattttgatttaatttttaaattatgatatgtggcaagggttgaggttcatattttccatactgaaatccaattgttccacattgcttgttgaaaagattttgctgcctcactggattcccttggtacctttatttaaaatcaattgaccatatatggggatctatttctggattctctattttgttcattgatttatatctatactttcatcatgaccacactgttttgattactgtagctctataataggccttaaaatcaggtagtggacattctccaactttgttcttcatttaaaaaatggctgtgagtcctttaagttccttatgtttctatatacattccagaattaaaaataaaacctactggaatcttggctgggacggcatttgatctacagatcaatttgggaagaaatgacaacagtattaagtgttccaatccatgatcatggcatatctttccatttgtttagccctttgatttctctcagcaatcttttgtagttttcaccatggaggtcttacatatcttttgttaaatttattcctaagtatttattttttgatgctctcataaatgaaattgcttataaaatttcatttcccaattgtttgctgttagcatataaaaatacagtggattttcatacattaaccttgtatcctgtgaccttgctaaattcacttgtaagttctagtggtaattttgtagatttcttaggatttttctgcataagtaatcacatcatctactgcctcttaaattattttgcaattccccgatactgtataattttagctatgtgttcagtgtattatacataactctgattcttatcaaaatgtatcattttagttattccttggctcatacatataaaatatgtactatatgttacacatatatgtaatattacagattacctatgtcatattacacatggatagatggatatctgctgctttcagctcacgtgcacaacctcagtagtggtatccaccatttgacgtgtgcacactggagccagctggagcgggtactcatggctgcctacttggcatccattcctcttcctctaccttccttcctagaataacccaaatgctgttgcagtatatatgctttcatgatagtgacaagctctctcgagctaccctgggctaccagggaggactcagggttggagagagccagaccgcacatgcatgtgtgcacagccccgtccatcccctgttcttgccacaagcaagcatgcagccctgactgctattgagaaacagccttcagatgaagccattgcagagagagagaagaacgtgggtcctaggtgacagcattgagcagggctgtatctcaccttgcctggggcctggcctgcttctgtacctgtatggatgatacaatagatgtccttatccttcaagccagtttgagttggaattctctgctgctttgcagccagaaacagcctaggtaacatttgggtattcaatgagatacaggcccggccctcagaaggttatattctaattaggtgacagttataattggggaaatcagatttctgcatatgtcacactgtaaaaaattacaaagtaatttaaataataaaaagctatagcgactgcattgtgggcacaaatgctaaggaaacctttgagaggaaggcttcctacagagatgtgcagaggcagattttgaagggagcaaggaaaggtggacattcgggtggcggctgtggcagaggaagagcctgaaggtcaggatgtgctgatggtctttatctgagagtagaacattcttgtagagaagtgaaagaaagattggagaccactgggagtgaaaggaatggaattggatttcttaggattgcatgtaagaagtgaatgtagataatctcaaatcgtttttggcaatataaaaaaatcctaatatctgcatacagtagagagggttggctgcaggagagcctggagtcagcggggacattgaagacgtctttacaatgaatgtaaaaattaagcgagcaggtcagaggtactgcagagataagaacagtttcgactttgtggattaggaagtaaataggaaagagattgggaatgtcagggaacagggattgaatgggcctgtgtgaggtaataaagggggaatgctgcaatcaatctgttaaacttcagctattacaaggctgtccaaaaaagtacctttggtgtgtaactagagtagcttccagtgtcatttggcggagaggaggggtgggtggtgtggatcatgctgaggaagaatgacagagatttttgattcatcagctatgcctcccaaactttggacaggtgtcattctatcatatccccatacaacctacacagttatttaaattgacttaaacccccaagtcttcccttaggcaacaattccatgaaatcataggttttgctgtttcagatatatttttccatgatatacaaaaatgtcgctatgaaaacgttcatccttgtaccgcctgaaagcatcttgcatcccaccgtggtcctcatgccccctgctttgggaaaactggtgtgtgagaacaagcggagtcagcatgaagggctggggcacccgggaaaagcacggagacattgctaggaggggccggtgtcttctcaaagggtgaaagggaagagacatcgatttaacaagcagccctagtagctgcaacacaaaggcatttgctataattggaagctgagaaaccaggctttagggaatgaaaatctaaaccagtgtttttaaaactgtaaactgtgacccactcatgggtcatgaaatcaattatgagtcaagtactgtaaaataatagtttactttaaaatgaaatgtaatagagggctgggtgcagtggtccatgtctgtagtcccagctacgtgggagggtgaggcaggaggatggctggaacccaggagttttaacccaaggcaacatagtgagacccccgtctctttaaaaaacagaaagaaaggggaaaaatcaggtatgtgagagaggaccaggattttttttttttcctttttatgatcagagactacataataaagaaatagagtgtacatcttcggatgcctcttgaccgaaagacgtagtcattcatatgggatatgagttaaaggaatgttcttgtcactaaatgtgctcaaatttcccttcacccgaagagcaagtagccagtgtctgtactaagttagacctgagggaaggaatgattattttattttattttattttattttatttgagacggagtctcattctgttgccgaggttggagtgcagtggtgtgatcttggctcactgcaacctccacctcccaggttcaaacgattctcctgcctcagcctcctgagtagctgggattgcaggcacctaccaccacacctggctaagttgtgtatgtttagcagagatggagtttcaccatgttgtccaggctggtcttgaactcctgatctcaagtgatcctctcaccttggcctcccaaagtgctgggattacaggtgtgaaccaccgtgcctggccaagactgcatttttaagttgcaagtaatatggtgaaaaattagtgtgtaccaacttttgtcatgttggttgtgcttgatatggtttggatctgtgtccccacccaaatctcatgcccaattgtaatctccagtgttggatgtggggctggtaggaggtgattggatcatgggggcggtttctcatgaatggtttagcacaatcccctcagtgctgtcctcgtgatagtcagtgaattttcatgagagctggttgttcaaaagcatgcagtgcctcccctccttcttgctcctgctcccgccacgtgaggtatgtgcggccccttcaccttctgccatgattataattttactgaagcctccagagaagccgagcggataccagcatcatgcttcctgtacagcctgcagaactgtgagccaattaaacctctttcctttataaattacccagtctcaggtatttatagcaatgagagaatggactcatacagtgctttttaaagggatatgcaggtatctaattctacatatctggaggaaatgtccccctcacctccccgacacacacccctgtatgtgttgcaaagcgtaatgactacttggtatttctattttctttttaaacagcaaaaattaaaaagaaaattagccggacacggtggcacgcgcctatagtcccagctactcaggagcctgaggcgggaggattgcctgggaggtggaggctgcagtgagctgtgatcacatcactgcactccagcctgagtgacagagtgagagagcctgtctcaacaaaaaagtttaagagaaaaatggtaatggttgactattttcctgctgagaagtgggcctgggtgatagcgaaacccagtctcaaaaaaaaaaaaaatttagaagaaaaatggtaatggttaatgatttttctgctgagaagtgggcaattacgcaaactttacctctagggaatggtttgcatgttaagattggaaccagagcaggggaaggggttatggtcctaaatcctaccaaactcagcagttcctgtcgctgtgttcctaaagatctgtggatgacagtaatgcttgacaacagtgacatatgctgacacgctatactagcagtttgaaaactggccagaggactcctgagggtccatgaaaccttttcagggagtctacaggtggaaactttttgtgccaacactaaggcgtcatttgctttttacccaccattgcttttccccatcaatgtcagcaccgtggcaaattctggtgccttaattcacatcaacaaggcagtggcaaactgtgacaacctcctactccaggggagaaggccagtgtcacttaagaaggtctttgataatgccatacatttattcattttgtcaaatctcagctcttgagtatgtgtctttttaatattctgtgtgatgaaatgagaggtgcacatataacttttccgttgcaaattatgatgatgttcttgaggaaaacatgtgcaattgagctgcttttaaaaccctgaaaaattgtagttatttggacctgggtatttggtagacagttttttttcaaaatgaataaactgagcctgtcactgcaaggaaaacaactgacatatttgttgtcaatgataaagtttgagttttcaagcaaaaattagaattttggaaaccttgtgtctgccacgatgagcttgacaatttccccatacttagagatttctctggggagattagtggtgttattaagaaatgctttttagttattgtgtaacaaaatgtgttcctatttggaagatctgcattagtcagtgagccaatattttccagatgactaatgcatggtattataaaatcatgcatgggtgaaagatccattcgaaatacaagatagggctgggcacggtggctcatgcctgtaatcccagcactttgggaggccaaggtgggcagatcacttgaggtcagcagttcgagaccatcctggccaacatagtgaaaccccgtctctactaaaaatacaaaaattagctgggcttggtggcgagtgcctgtaatcccagctgttcgagaggctgaggtaggagaatctcttgaacccgggaggtggaggttgcagtgagctgagattgcgccactgcactccagcctaggcaacagggcgagactccacctaaaaacaaacaaaaaaccaaaaatgcaagatagatggacagattctaacataatagactctaggtaagtaggctccgaaaagttcaatgatatggtgtcagattacacactgcggctaaccttcaagaaactaccacttgtcctctgggttcatccatgttgtcacagatgacatcaggctaagtgaaataagccaagcacggaaagacaagtactgcatgagctcacttgtagattataaacagtgaaactcataaaggcagcgagtagaatggaggttccagagactggggctggggttggatggggaaaggcaggaggctggccaaagtgtacaaagtttcagtttcatgggagaaataagttctgatgtatcgcacagcactgtgactacagttaataataaagactgctaagtgtagattttaagtgttctcacaaagaaatgataggtatgtgaggtgacagatacgttaattagctcggtttaatcattctgtattgtatacacatatcacagcatcacagtgtaccccataattatatacgatttttatttagcagttaaatatttaaaaaaccccaccacttgtcaagaaggctatccacaattatctgaagaggtaaaccaatacactcctctctttttttccaaccgcctatctgtctgaggctcgattttcttcatgtgcttcaaccaaaacaacatatggcaacagaccgggtgctgaagcagatctgagaattccaccgaattcttctaacccagacatgaaaaagctttgcagcaatgtaaaaggagttctttttcacaaagatggatttatgctaatatgtaatgagtttattactgatcttttcagataaattaatatttaaaaagttttaatttataatatggtaaattctttttcttttttcttttcttgttttgctaatcttctctgtatcatcccagttttagtatatgtgctgtcaaagcaggcacacaatatggtaaatattagtagatggaacccaatatccaaaaaagcccattgggtctcttttttctttttgagatggggtcacccaggctagagtacaatggcatgatcgggctcactgcaacctcttcacccccaggctcaagtggtccttctcatgagtggctgggactacagatgtgagccaccacacctggctaatttttctgtagtgatggggtttcaccacgttgtccaggctgggcttgaactcctgggctcaagcgatctgcccgcctcagcctcccagagtgtcaggattacagatggaagccaccacacccggcttgtttgggtctcaataattatgagtacacaggggtcctgagaccaactgatttgataactactgaactgccgtacagcaagacctcaagctcagaaataactcaggcgctaatgaaagttaaaggaaatatccctttcctccttttctctgaacttaatgccctagaattgtgtgaggtatcaacagaaaaaactttaatcatcatagcagagcctagtacagctataatccaaatttctactaccttctataaaccaagaggtcctgttccctttatctcaaccacatcattagtagtgttttcagtgtgaaaaaattatcattaaatttgcttgttaaaaaaaaatacgttagctttttgcctaaataccacatacatattttaaagtgcaaggggttttagactattctagtgctgattaatatagcttcagtcccctttagatcgaaaacaggaaaaaatttgtccttatgagtactggataattaacaaaatgtacataatttagttattctcacccaccgatacgacaacctggataacctcaggctactagaatccaaatcatgggttggaaatgcaacagagaagcaaacaggaatgggttgaaaattcttttttaacatgttacagacttggggctgggtgcagtggctcatgcctctaattccagcactttgtgagtctgaggcgggccgatcacctgaggttaggggtttgagatcagcctggccagcatggtgaaaccaagtctctactagaaatacaaaaattagccaagcatggtgacggatgcctgtaatcccagctacttgggaggctgaggcaggagaatcacttgaaccctggagctggaggttgcagtgagctgagattgtgtcactgcactctagcctgagtgacagagcgagactccatctcaaaacgaacaaaaatcttacagacttggtacacgtctcgctgcagataagcccaatcctttcatatactcataatgacagaaatctgtcaaatttctattcctcaaaagagactgaaccctacttaagttgataaatacccttatatgcaatataattttacttgtttaaaaattatcataattattttagatgttttaaatcatggtgttttcaaaatgaggataatttctttgtgttttatagatgctggggttttctttatctgtttttggacagacaaacccatccttttgaaatagtcatacagtgttcattggctgatcatagatatgccaaccaggaaagcctttcttccatttaactttgtcttcaaagaaacgtgtctacaggatgtcccatggtgaaggatgaggacgaggcttgcagcaagccatcccctggcccgccttctgtgctgcagtcttcttgcaccccagacacaatcacagcattgctagcttcccctccttaactcatatggctcactgatgttagtcatttctattttttctctatgcctatcaagactacctctcacaaatgcaccttgcccccaaacccttcctcccactgtccatatagttatgaattcttttgctatgtcaatattcaaggtttcaacttattacgactatgcaaatactactgatacctgagccaaaccatatagtgtactatagttcaccttcctttttgtcatttttctcctgtgcttttactatgctcagtctgatattggagaaagtgccagagacagtaaagggagacaaagtagaggaggaggagaaatgtcaaagtagctcaggatatgctgggtttttcttttttgagacagagtctcgctctatggcccaggctggggtgcagtggtgtgatcttggcttgctgcaacctccatctcctggattcgagctgttctcatgccccagcttcccaagtagctggggctacaggcatgtgccaccacgcctggctaatttttgtatttttagtagcaacggggttttgccatgttggccaggctggtctcgaaatcctggcctcaagtaatccacccaccttggcctctcaaagtgctgggattacagacatgagccaccatgcccggctgggatacgttgttgttgaattcactcttgaaaatgaaatattcccaaatttaacctgaggagagggactcaaatgacaagtattactcgggaaatatgtgaacaagtcattatatttttatttttttacttgttatttcttgggtattctttcagaaagaaacagcaatagttttgtattcttgaaggacaccacatcagagaaatgaaagggtacgccatctctggacagccctacactgccattcaaaggtatttggcccaaaagtactctgtgcggcattgctttttccattttcctcttcaaaatagcctattagatatgagctgatcgctcctaagaatcgtgagccctccttaatctctctgctgctggaccctaacacagcccatgcagaatcacctgtgtgtgaagtagcaccctgggcaagaagcccacagctgcttggtggcttggcagcctctctaggactaaaactcagtttccaagggtagtttagcaatggtaaggagtatggattctggacatactacctgggcttaaccctggcttgagcaatttattaaattgctccaggactggctacataatttgccagatccagagcaaaaagaaaatgagaggtcccttgttcaaaaattgggaatttccagactatgacaatagagcatcaaatcaaggatgggactcatctaaacacagggccctgtgtgctgtgaaacatccatgaagctgctcgtgcctcagtttcctcatctgtaaaatgggatcgtagcagcacctacctcatagagcggtaaggaatatgtgagttaattacacagacagcacttataagagtgccagcacttagtaagagctcagtaaattattatcacaccccacatagcctacactttgagtcaggccatctcaaacatactacccaaatctggtgaaaattcatttagttatttctctgtgacatggtaaaagtcaaacaggcaaacttaatttgtaaatttcattaacagcaatacagctgtttgaaaccctggaatttttatcagtaaacaaaaactcagtctaatttttttaaacctgaaacctgagtagcactatattgtgctttattgtagttaagttttaaaaattataagtacatattcatttatcatagccattgataactataaatttgttatctaatgaatgagtcacgaaaaactggaaataaccaacaattttaaaaggatgacaatacaaactacgtttcacgacaataagaaaacccagaatttggccgggcatggtggcttatgcctgtgatcccagcaatttgggaggttgaggttgggcgaatcacctgaggtcaggagttcaagatgagcctggccaacatggtgaaaccccatctctactaataatacaaacattagctgcacatggtggtgtgcacctgtaatcccagctactcgggaggctgaggcagaagaatcgcttgaatccaggaggtggaggttacagtgagccaagactgcgccattgccctcaagcctgggcaacagagcaagactgcatctcaaaacaataacaacaacaaaccccaggatttattccatatgcaaatatcttaatccaacaatatatttagctaaacataaacctttgaaggattgaatccatttattaggatgcaggtagagggatgccaatgtcttaggtagcatgtgtaaataaataaaaaatgtgttttctcttttgatgttgttgtttcctgatttaagaatgaaaggtaacttgattgtattggatcagtagtttgattcaagtaacatcgtggaattcaaaagtgcaaaggtaaaacctcaaaagcatatttaggccaggctcggtggctcacgcctgtaattccagcactttgggaggccgaagcaggtggatcacttgaggtcaggagttcgagaccagcctggccaacatggtgaaaccccatctctactaaaaatacaaaaattagctgggcatggtggcaggcgcctggaatcccagttactggggaggctgagacaggaggatggcttgaacctgggaggcggaggttgcaatgagctgagattgtgccactgcactccagcctgggcgacacagtgagactccatctcaaaaaaaaaaagggggggtggttattcatcagctgttaactgattttaattaagattttgaagaatattctcaaagtcaaattgtgtgaccatagtgtatataaaatgaagacagcaaacatcgcctatggaagaagacataggttgggctcaaagcttgcacctttcctctctcggtagttctggctctgagtcccagctatgccactgactcactgctggactgttctgtgtgtcagtctctaagcctcgtgccaatgtccactgtgtgcctggtataggtcttggctcaggctaggtggcaataaatgctgttgttggtttgggagtggggagtgccatttggtaaaatgaaaagaacatggattccaaaggtaggtctcaatttgaatcctatctcaatcatttactagtcatacaatctccagtagattttatttttctaaaccttggttcttaacttgcaaaatagagataataatatcttctttgcaggactgttgtgagaatgaactgaacttgtgtgtggctggcccataacaggcatcaacaagtgggtttgaatccaagcccctaccttcatagtctagacaccaggcagaagagactaactgctttgggctgtgaggatgagacaaaaaagcagctccatctactttgagaagtcaaatgtgtcaaatgcttgtttttatttgtaaagtaagacacataaacaatattgtgtttaaagaatgatggagggcaggtgcagtggctcatgcctgtaatcccagcactttgggaggccaaggcgggtggatcacttgaggtcaggagtttgagaccagcctggctaacacagtgaaaccccatctctactaaaaatacaaaaattagctgggcatggtggcgcacgcatgtagtcccacctactcaggaggctgaggcaggagaatggcgtgaacccgggaggcggagattgcagtgagccgagattgcgccactgtactccagcctggtgacagagcaagagtccgtctcataaataaataaataaataaataaataaataaataaataagaataatagggctgggtgcagtggctcatgcatgtaatcccagcactttgggaggctgaggcgggcggatcatgaggtcaggagtttgagaacagcctgaccaacatggtgaaaccccgtctctactaaaaatacaaaattagccaggcgtggtggcgcgtgcccgtaatcccagctactcaggaggctgaggcagaagaatcgcttgaacctgggaggcaaaggttgcagtaagccaagatcacgccattgcactccagcctgggtgacagagcaagattgtcgcaaaaaaaaaaaaaaaaaaagtatttcacagatcccagagcacctacaaagtaagagttgttttatgcatttgccaaatccattgaaaattattttaagactgaaaataacattttcaaaaattatttgccaccaaatgtgcctgatctaattcagtattggggtgcgaacacacgccgaaacagtacaaaaataggcttatcccaagcacattaatgaagaacatgttataagatgattttaaactaatctgcagctctatcactaagcatctagcagaacacattataagcgttctatcaggttatttctggtgtagacaaacgaaaagccagtttctattatttgactggtgcccatttgtattaaaggactaagatggaaaagaggcaaagaatttcctaattactgatgacaatgatctgctgagtcaagtcagaatgtgattcagtaagattggaggggaagggaatgcaatataatggatgggtacagtattgctggtactgtgttgagctgcaggaagattttgctgactttcttgagaagtgaggggatctggtgcctgagcaatcaaccatgattcatagtaacttgctacagtgctgtttgaacagaaataaaatttgacctttttctatgcacccaagccactcaacaaaatatatttgtaaatacaattccatcttctgacattggatctaggcggtttatttaaaaagctgggtctttatgattttgttttgcatagacttaaaaaaaatttgtgtttgttttatccaggccatagattcctgctctactgctctttttgcctcctgcttctgtttctcagaaaaatagaaaattgactttgctttgttcaggggagtccatggcatgtccaccactcccatttaagtcaggttaacagggtaaatgctgacgatgcactgagtctactggttctaaaagccctttgtatttgctttaccaccttataaaaaggcatggatcagtatttgtgttgaccttgaggcttttcttctcacaccacgcagatatcttaacacaggggttcacacatggtgaccgggcagacagatgcgtgtgaaactaatgtgtagactaaatgcaatatacagttaatgcctggtgggaaacagaattttcctttaattgcccatttgtaagattgaataagtaggcaggcagagtgtaaacacagccccatctatagacgtgtgtcttgggaacagaaaggatcacacattcttaagctaagacaaaggctttagtttgaagataatgtctttgattatttcagcatggagggctatagatagcctcttggaggctccgctagaaaaaattcggaatggattaagtatatattttcccactagctgtgtctgaacacatcactcacggctcatgcgaaattatttctctgccaggcgtggtagtgcatgcctgtagtcccagctactcgggaggccgaggtgggaggactgcttgaggctgggagttcgaggttacagtgagctatgatcatgccactgtactccagcctgggtgacagagtgagaccctgtctccaaaaaaagttatttccacaattcattcctacattccggaaaagaataaaccatattaataccacatcccaatgctagtattattagatctgagtagtgaacacatagactggtattcagagattccccaaatcaatctttaattgttagacataataaaagtgaaagggcagattcaagtccaggaacgtggacagatcttaagaaggaaaatctcctttctttcaatctcccagcttctcaaacccgtagctgagtcttgagcaggcaaatgactcagaaacgtttatggtctccctggtactaaagtactgtatacttagtttcttaaaagaatctgattcatagtgagccattctactgaaattgcacgatttgtatccaaatagcaatacaacctctatccaatggcttttggtatataataaatgctctccaggctatatgtaacattcgttgtttactatattagaaccagtagtttgctttataatttgaattgtataaagcaatacttatactgtgtgtctactagattttatgaaaataagacttgaaaagatgacattcctccaacaatgaaaccatgtaaattgaagacagggacctgattatactattaagtgaaaagctaagttgctgaacagtctctagcagggtctacatctgttatctgtccatttctgtatttgtgtataaaggaacaacaaaagttagacgaaaatgtgacaccggaatttatccatttgtctcaaagaggcgggattccaggaagttttaattttcttttttatgtttttccttttataatcagaggaatgtcatttttaaaaggtttgagttgtggtgtaatacacatagcatagtttgccatcttaaccatttttcagtagacagtcagtagcattaagcatgctcacactgtggtgtaaccaatctccagaacttcttcatcttacaggaatgttgtttttaaaagagagaaccaaatacttctccagatgtatgtgttttgaaaaatcaaatgcaaagtaagtaatggcttaatcagaccgaaccaccataattgaatagcctgaccaattcgtgaaagaactagccatgggcctttcactgtctttttttgtttttgtttttgtttttctgagacggagtcttgctctgtcacccaggctggagtgcagtggtgcaatcttggctcactgcaacttccgcctcaagcaattctcctgcctcagcctcctgaatagctgggactacaggcacaagccaccgcacccggctaatttttatgtttttggtagagacgggatttcaccatattggtcaggctggtcttgaactcctgacctcatatgatccaaccccccaccttggcctcccaaagggcttttgattcagcacatgaagaggaaatcacgggcagagctgtagaaatcgtattagaatttcatctgtgtagttccttagaaagcttttcattgaaccacctgtttcaatttccattttttaaaaaaataaaatatacctctgtctgtaatcacgctacgatgagcagctgacattcttactcaggacttagaataataatgctttagagtcctgcacgaagcctccaaaagagtggaaaaaatacacaacccttcgaaacaggtttactcaagcacggtgagagaggctgggcggtcattgattaacagggtatgcgttccttctcaaagagatggcaaaggaagcttgttctaaacttttccaccatttcaatggctactttctcctgagtcattaagggaacactggtattaggttttgtgtcacagttgtaccaaggatacctcgccagctaaagttaatgcttttctaagtgcttatgaattaggggacagtcccggttctgagctgaaggaattctcatctaaatgcaaatcaagacaagcctgtctaggatgcataaataggtacagtaatttttccaccatttaatgttcagccccccaaatgcattttcacacaactctattggtaaagaagtatcccttattagaattaaacgacatttgctttcttccccgcaccggctgttacataggtagaaagtgttcagagtcttgatttggttgacttaaggcatgggaaataaaatggacaaagagaatcattttcctaacctctgcttctccacatcagacttctaaatccacgtccgtgccatttctatttgatgtcccaaaggaatgaaagaaaatgtgccccagatggaactgaggtttcatcccagctctacttctccgtccagtgtttttctaatttaatgacactgtcatccttcctttcatgccagaaactggagagtccccctagagtcctcttcccacacgccacatatccaggctgcacttttataatgaattccttcctctgaatctccactcctgtggctgtaattcagccttttgtcacctctcactgggctactgcagcactttactggttttctggtttagtcttttccgcataaattccagcctctagcctgttactagagtaatcattccataaaatgcaagtctgttgctgggcgtggtggctcccagcactttgggaggccaaggaaggaggatggcttgagcccagaagttcaagaccagcctgggcaacacagggagaacctatctcttcaacaacagaaaaaaaattagtcgggcatggtggtgtgtgctggtaatcccagctacttaggaggctactcaggatagcttgagcccaggagtttgaggctgcagtgagctatgatcacactccagcatgagtgacagagggagaatctatctctaaaaacaaacaaatacataaaacacaagtctgggcttggcacagtggctcacacttgtaatccctttggatttgggattactttgggaatctttgggaggctgaggtgggtggatcacctgaggtcaggagttcaagaccagcctggccaacatggcaaaacgctggtctcttccaaaatttaaaaaacaaaacaaaacaaaaaaacgacacaaatctgaacaagtccctcctctggaaatcatggcaagggagggaagggcaagtttatgctgtttgtctgtgccacttcaaatgtgcagcccttccttactcaaggaggttaaggggaagaacaaagacccttccaccttcactttatgttactccaaatctcctcaatcagcccaaaagcagagtgtgtaattctataacgctctgaaggcaaggagtataatcttcaagtcctaactctgctggattatttaccacttggccaacattttctttttgtttttgtttttcaaacagggtctcagtcctctcgcccaggcaaaatcatggctcactgcagcctcgacctcccaggctcagatgattctcccacctcagcctcccaagtagctgggactacaggcgtgcaccaccagcccagctaattttttgtatttttaagagagatggggttttgccgtgttgaggctggtctcgaactcctgggctcaagtgatctgcccacctcggcctcctagaccgctgggattacaggcgtaagccaccacgtctggcccactttgccagcttagtggccagtctgatcctccttaagggcaggacaaataactaattccactgccctctccagtggaatgcactccacgtctttagtgaggcaaagcactactgtttgtcccttgcctttctggggatgagactcaatctgcccctttgcattggatgttccaacaagcaactggctagcagtataaagggaagctctggcacagattagtcacagattggcaaactttctgaaaaaagcccagatagaaatatttcggctttgtgagccatatagtctctgttgcagcaactcactctgctgttgcagcatgaaaacggcaaggacaataaataaatgaatgcacgtagctgtgtgccaataaaactttaatcacaaaaccaggtggtgggccagacttgacccatgagacaccatgtgccaaacccctaatcaggtatatgagctaagatgctgcgtcaaccttggatcagctgagaatctcggatctctccagaggtgacggacaaccatgctgagaacacggattctggagcccagctgccttggttcaaatcttggctttagcgtttgctagccattgagcctttgggggagtaactttacacaattttatctcatttgagcctcacagcaaccctgtgagataaatccgatattcccatttaacagaggcccgggtacagtgggatccaaggtgcaggaacttcccattagcacagggacatgccgagtcactctcatcttttaaaagaggtgccctccctgcctgggtccccctcctcctccagccaagccctcactcacatctcctcttcacaccaagcttcttgataaagctgtccacatcctccacccttactttgtcatctcacactcactttgcaaccctctgcaactggcttctgtccctggctttgaaattggtgacagttttatcatgatggtttcttagacaagaaatacacatatttaaggtctactgcatacctaggtgatgtcctttattgacattgccagcccaagttagggaaaaagataatcacggtgcactctgcctcccaatagaggtgctatatgtaggttacctgtgattcactctagtgaacatctcaactctacaacaccaatatttgagccctggcctcacccaggtgaaggcagggttgcctctctaggatggaaaaattcaatatgaaccctaaagtggccatcgtcatggttaagggatgcagattttatcttgagaactctatcaaccaagagagcaaaataatacactactggacatttccatttttcaccctacacttgcatccctgtgaccaaaatgatgctaatccaaggccatgcaatctgtgcatctgtaggagtaggtatttcatctgttagttttgctgccccgtgagtgaagaggcaggatgcacccttcaatggctttagctccagagttctgcttctacaggatgcaccccctttttgctggggagactctcaaagagaggaatgatctcaactgtctctgagtgctcagtgcctaggacagtgccaagcagataggaaatgaccactgaacaagtgagtcccctcatgggtccctggggagacgacagaggcagggagtttatcacattaaaaagatccaacagcttttctttggagctcagctaccctggggaacagaatgagtaagaatcccaaagaccccggccactgctcagaaaaaagggccacgctcccagtcgtgtgtgtctctctctctgccttctttctgttcattgagtcatgattccaacagtgcaggaacataggaagaatgccaattataatatttttttgacagctgggagaatagacacactctgcctgtctcttcagcacacaggcagcacttgtctaagcgccagctctcgtgataaccaatcccgctgagaatcagttctctctgtagctcctactccttgacccaatgtgaaatttttccaaactatttttaaagtatctaatctgttgtgagtcacagactatagagctgctagtttaccatttctgggcagacagctttaacatcaagacctgatgaggttgtaagggtatttaaaatggcagtcaggaatataagagcaaagtggtgcatataaagtctttaactgttccttaatgtcaagcgatttgagatatttatagattttttaagtgcctttctatctttgaaagaaaaggtaattatttcacataacaaccttgaaagactggtcagtgatcttctcccagattttcataataggagaactaggggtcttggagactgactgaatggcaaaagacagtccatttttaaaaacaacccaaagctcttgagtttattatccatggctcaattcactgagctatgctacctcccctcacaccggatgaaacaagtattagttatctactgatccataacaaatcaccaaaaactcagtggcttcagacaacaataatttattatctgttatggactgaatttatgtgttatgtgtttccccaaaattcatatgctggatccctaacctccaatgtgactgtatttgcagacagagcctttaaagaggtaattaagtgaggccatagggtaggccctagtccaataggacttgtgtccttaaaagaaggagaggagctgccaaggatgaaagcacagtgatgcctctgtaagccaaggagagaggcctcaggagaaactgaacctgccaacaccttgatcttggacttccagcctccagaaccgtgacacatcaacttctgttgtttaagctgcccagtctgtggtattctgttatgatagtcccagcaaactaatatagtatctcttatggtttccgtgggtcaggaattcatgaccagttcagttggacaatcctggttcatggtcttttatgaggtctctcagttgggtatagctggggctgcctaatctgaaggcttgactggggctggatgatccacttccatggtatgccctcccatggctggcaagctagtgatggctgttggcaaggggccgtagttcctccctgcctgggcctaatgaaacttcttcattcagtcctaaccaaccatcctgcagccttccctttagtttagttatatattaaatatataataagaagaaataggacagcccttattttctcctgtcaggattttggtaccataaatttaaaaatgaaggggagaaaaatcccatgtattttccatggtgcactacccagatcccctttcagaaatgaagggtattttcccagctgttgagaaccctgccaactgacaaccttcaactattagccgggattgcccttggctaaagagagctgccttgcccaaggtcagctccctgcccaggacagctgtcgtctactgactggctggtgtcagagtataaaggcctagtttctttgcaccaacctgggataactctgatgagccgccccagcttagtcctccctgtgggttagctgaggcctttgttgagactgcattgcatcacaacttcaccctctgcccaatcttcctgccttcccttctcccacaggtgtcaatcctcagagcacttcatgataaacatcctgcacaccaatctcttcttagagtttgtatctgaggggatgcaaaccgcaacaatctactttacaggaagattattctcagagctgtcaaccatctaaaaatagccaaatgaacctccagattctatctagtacatcatgtgttcaactgcagacctagctgttgaaaccaagtgataaggtagattgtcttggtagagatagaggtgtgcctaatcctccacttcttcctgtatccactccctctgtaatgtgactgccacttctgcttcattttgttggccaaagcaaatcataaggccaacccagatctggggaggaggaaacagattctaccttggataggaggaactaccgtgtgcctgttctgagcctaggcctcaagggaccttgcatatacttctgtctctcttggaaccctgtcacaggcatttgaacgagctggggctagcctgctggaaaagagaccatgtggaattgagacaagttagctgttcctgccgaggtcactctggtccagccagtccccaagtaacctggtaggtgaccaaagatgtagtatgaataagcacagtcaagaccagaagaatgcccacccaaattgctgacccacagaattgtgagttaagtaaatggtggttatgttaagttttggggaggttattgctatgcagcaatagaaaaactgatgtagtatcagctatggtttggatgtggtttgttcctgtcaaaacccatgttgcaatttgatcccccaatgtggcagtgttgagaggtggggcctagtgggaggtgtttgggccatgggggcaggtccctcatgaatagattaataccctactgcaggggtatctcacaggaatggattagttcccttgagagcaggttgttaaaaagtgcctgtcttcctcagtttctctctcttgccaggtgatctctttgcacatgtctgctccctttctgctttccatgagtggaagaggcatgaggccttcatcagatgcagctgctccatcttgagctttccagcctccagaatcatgaatcaattaaacctcttctctttataaactacccagcctcaggtatattgttacagcaacattaaacagacaagactcaaatctgctggatacatgaatcagctggcaaaagaagagcatagagaattcagactatagaatatgtcctcgattcattttaatgggctctggtgcacccagctgctgcagaagctgctaccgatggctcacacctgcaacctttttagcaggatcgttcttgggtgatcaaagccatctcagctggaggtgcatctcccttgtcctgggacatcctataactaaagcctgtcttgtgtgagggcacaaaatccagctgtcttgcctcaaggtagggcaaattctggggcaatttacagcaccaatctcctctgctgtcacaggctgagagtggatctcatctgcaaccacatctttgctcagcttcttcttcctttctctcaccctcttacaggttccttccgagagcactcccttaataaacaaacaaacttgctcctgaaaccccagctcaggctctgcttccaataaatcaaaagtgaattcctaggagaaaaagatggggagcatgggagtgactgctgtggaaggaaattggaaaagcgctgatcatcctaacacctttgcagtagaagttttcaaaccaatagaagatgactctcctcccattggtccaagacaaacgtctccatcgcaagtgcttgatgtgctcccactgcctataaggaaacgcactcctttcctttgtaagacgggaatgacactttcttttctctccaatctttaatttctccctgcactcactctttccccagtagggtttgagtctattcctctttgtaggaagatgccatcacctccattcttctagctacagcccctgtcctctctctcacatcaggatacttgagctatctacactagagatcaccacttctttatcccttaatcatcaactcacattacatggcttctgctgtcgaccctgccactaaaagtatccttgccgaagtcacaacgaccttatgttacacaactagttggctgcatttgatgtcactcaacactcttagtatgtgaaacacgattacacacattccctttgctcctgtgatgctgtgttcacttggatttctgcctcatttccagggaattcagaatccgtttttttcgattgtcccttagatgtccacgtgttttctggttctcttttcacctgccatacatttctatgaattatttcacctactattatagcaccaattgccacttatatctgaatgattttcaaattgaagttccagctccagactcaatatccacttgccctttgggcacctcgacttaaatgtgccacaggcgccttattggactaccaccacctacacacacacctgtgcacacacctgcatgcacacacacctgtgcacacacttgcacgcacacacctgtgcacacacttgcacacacacacacctgtgcacctgcaggcacacacctgtgcacacacctgcatgcatacatacttgcacacacagttgcatgcacacacacctgcatgcacatacctgcatgcacacacacctgtgcacacacttgcatgtacaacttgtcacacacctgcacacacctgtgcacacacacttgcatgcatacacacctgtgcacacacctgcatgcacacacacctgcatgcacacacacctgtgcacatacccgcatgcacactcacctgcatgcacacatacctgcatgcacatacacctgcatgcacacacacttgcatgcacacacacctgtgcacacacctgcatgcatgcccacatacacccacacacatgcactcacatatacaccctgccctcttcctcctctgctccatacccccagagctggaactatcatccatccacttttccatggcaaaacctttggaatcacccctgatttgtctccttccccttcaattaatcaaccactaccttccaaattcctttcaattttaccttcaaaattgccctctacttttaaacacgattccatttctttctaccttcagctgcaacctgggcctagattacttcacactgcatctcgtctgggctcctgttctaaccacctccaatctaatttccataaccagttaggggatcaccctaaaatgcacagctgattattgcttttccctgttgaaaagaatttcgacttcctctgggatcagctcttccactcatcaagataggatggggtttcctcccacaataacggaacgggttctatcacactccattgtaatgaattacctgtctgttcttcccaaagaaacaaaagctccttcctttgttcaattagtagatattcactgacaccttcctatgcataatgcacggagctgttaatcaaatggtaaataaaacaaacattggccttttcccattagcagggctcacatatttgtcatcctattacccatgctagcagttttaggcacataagttgcttaataggtatttgctgaataaatacatgataaaatgagtgctgttggccgcgcgtggttggctcacgcctataatcccagcactttgggaggccaaggtgggcggattcacctgaggtcaagagttcaagaccagcctggccaacatggcaaaaccccgtctctactaaaaatataaaaattagctgggtgtggtggtgcatgcctgtagccccagctacttgagaggccgaggcaggagaattgcttgaacccagaaggcagaggttgcagtgagctgagatcgcggcaaggcactccagcctgggtgacagagctagactgtctcaaaaaaaaaaaaaaaaaaaaaaaaaaaggagtgctgtcttctaaagactaattttctccattccattccctattttagaataaaattcatgggaacagattttataaaaatgatcttcatggtcgatgtttacagaaagtatctttttattacaaaaggcagagataaattacatccaaatattttcagaccatcaaaagtctttaagtaactcacattcctccacagagattatcctggtagccaaattaacagaatcagccaagcacataaggaacttagcacataaagatactcaataaaatccaattataaaggagcaaatttctacgaacttgaaactaccacccaccctgctgccagaatgtaatgatatgttctctgcatgccaaacatatcttctcccaaaagataacaactgttttgggttgaatagcgtcctctgaaaagaggttgaggttctaagccctggtacctgtgactgcaaccttatttggaagcagagtctttgctgagtaatcaggttaacctgctgccaggatgctgaaagcagaaagggcttgagccaaaccttggccacagaggctgtgaatgacgcaggtgaaggcagcccttgctggcctgagggctgaaacttacaagtggggtgaggggcttgcttaccatcaggtaaccaatggggacattctcttccattccttgaaatacaccctttcaaaatgtaagtggggagccttgggccatcagcctgattttcagaagctcaaatgacataaaaattggagtcttgaccagatcattcctctttttggtttatggtgataaatatacataaaagttaccatttgaacttttttttttttttttgagatggagtttcactcttgttgccctgggattacaggcgtgagccacctctcccggccaccatttgaactatttttttttgagaaggagtctcgctctgtcgcccaggctggagtgcagtggcgccatctcggctcactgcaagctctgcctcctgcgttcaagcgattcccctgcctcagcctcccaagtagctgggattacaggtgtctgccatcacgcccgggtaattttttgtatttttaggagagacggggcttcaccgtattagccaggatggtctcgatctctcgtgatccacccacttcggcctcccaaagtgctgggattacaggcgtgagccactgcgcccagccaccattcgaacgattttcaagtgtacagttcagttgcagcaagtacattcatactgttgttcagccatcaccaccattcattgccccaactctttcacttttccaaactgaaactctgtctccgtcaaacactaactcatcttttcccctccccccagcccccggtacccaccattctacattccgtctctatttggatgactctagggactcctataagtggcattatgcagtatgcgtccttttgtgactggcttatttcactcagcacaaggtcctcagggcccctccgtgtcactccctgcgtcggaacttcctctctttttaaggctgggtactattccatcatctgtatacaccacatttgtttatccattcacgacatttggattgttgttgaaatcccactcgactgcacactcctgctgccagccgcgtgctgggcacagggcacgtgctctgggtcagctgctgagtatgggacacagctgagcatactcactctctctctgaccccaggacactccctctctgatcaccgtggcaagcctggaaggacctatacttgttggccttgaccaagggctgcgtggttgtgtggggtataaacagttgggttataaggagataagaacaccactttcctgttacactcgcggggaggaagctgacagcaaacccagagcactccctgtattctcttttctttcaactgggaaggctctgggcttgtccccagcacaaagctgctgccgtcaaacatcagggactcgtggaagagccctgcgtctgtgtctgtcactatcccttcaaatgatctcaaataaatcgtggttttctcgtcaaaccactgtctcttcttaaatggggttattctaatccatgatccctagtcaaagcctaattttcttttctagaaggttctcccttccctctcccttaatgtaaacactgacagtactccaggctcagcccagcaggtgacgtgccttgaagctgtcattgcccttatcagaccagcggttttccgtttctccctcctgtagggccgactgtgccactcattatcccggcgaaaccgctctccccctttactgagctgttttgccccagtactgttcagttcccaatcagattgtaagctctagaaggcaggaacaataacttgcagtttaacctttggcacctgaaataatactttgctacacctgtgtttaataaaataactgaatgaacaagaataggaatagtatgttctcagcatggcaacgcatcttctcctaaaagataacaactgttacagattggaccgtatctcctaaaaagagatgttgaagttctaagtcccagtacctgtgaatgtgacttttggaaatagggtctttgtagatataatcaggttaagatgataggggtgggccctcatccaatgtagcttgtgttcttttttttttttttttttttttgagacagtgtctcgctctgtcacccaggccggagtgcagtggtgcaatctcggctcactgcaacctctgcctctgggttcccacggttctcatgcctcagtctcctgactagttgggattacaggtgcccaccaccacgccaagataattttttgtatttttagtaaagacagggtttcaccatgctggccaggctggtctggaactcctggcctcaagtgatccacccaccttggccttccaaagtgctgggtttacaggcatgagccaccgcacctggccttgtattcttataagaaggaaattgggatgcaaagaaagacaaagggaagatggctatgtgagaacgggacagagactggagtaacactgtcacaagctgaagctggagaaggcaaggaagaactctccctagaggctttgaagagagtgtagccctgccaacaccttgactttggacttttggcctccagaacagtgagacagtacatttctattgttttaagccatccagtgtgtggcactatgtcatgccccagtgacatgcgacactaatgtgacaactgaatggagtggttccagccatacaggtagacccagggatgtggctctcacagtgtcgctgggcacgggaataatactgggtacctgcggtaattaaaccagcagtgacagctggggtctcagtagggcccactgtgttgaaacagagagtgcttaagtgcttagtgaagccacggagattcgctgcctcggtctcaggaagtgctggaggctgcacacgtctgtcgctccatcccactcctctatgaaatgctccccttccaaagagggcatcctaagtctgatgatgtcatcagactcaaaatcttaaacctctagaataacacttctgttttactttttttttttgctttacctatgacattttatgaatactgtagtatcccaagcaaggtaaattcaaataaagctttcaatgaatgatttttaagaagctgaggggaaaaaaacctcctcctggtcatgtcccagatgttaccatttttcattttgtttctttttttcttttttttttcagacagagtctgctctgttacataggggctggagtgcggtgtcatgatctcagctcactgcagtgtctgccatctaggtttaagcaattcttatgcctcagcctcccgagtagttgggatacaggtgcacgccaccacacccagctaatttttgcagttttggtagagacagggttttgccatgttggccaggctggtctcgaactcctggcctcaagtgatctgcctatcttggcctcccaaagtgctgggactacaggtgtgagccaccgcacccagctattttttgtgtatttccatttgctattgtgccctcaccatttctccctcagcctgtgatttatggtacaatatcctgaagatgtcgggagcacacgacctcagcctcggctgcagatagactgctcagcttggggcaataactgctctgccctccctctgccacccggcagccccacccacagaagggcccagacttacggctttggagggagcatagtgtgtcggtgatgccagtggaggcctggtcgggctctggaaggaagacgggcagaacctctgccctgtgtccgggggggaagacgaggcatagatgcgattctctaaccgttcaggctcgtgcttataggattccaggggaaacgtgtgctgcttggtcacttgggtgggtgttgacggagaggaggagaggccggaggctgcagaagaaacaccaaggacggtcagaggtccggcttccaggaagggacgtcgggggtggtcagaggtctggtctccaggaagggagatggggagaggtcagaggtccggcctccaggaagggacgtcgggggcagtcagaggtccggcctccaggaagggacattggaggtggtcagaggtcccgccatggcagagggaggctctcaccattcctggtgcccaaaacctcaaatggcaagaagccaaattattctgaatgttgaggaaaagctttaaaaaccaatttctagtctcttagaatcagctgtttccagaaacgcctcactatccacgctcggttgtgggcagcatcccctcattgggaacggggtgctcacacggtcccgagttatctggtgaacttttacacacaccctccagaggctattttcctccattcagccaaatatcatttgatctcctctccttctttccccagcatggcgccaagagcaaacgcagtggtgccttatttattgaggtaaaacatggggaagttcggaaaatgtgcagcagagatgcaggccaatgctgcagaagccatgggaccatgtatctgaggagggggagggggaggggacgggaggggaggggaggggaggggatggatgtgttattcctaccaaaacgtgcaacatgaacatcaccactgtaagttcccagtagcaagacttcactgcgaagataaatacccaaggagacttcagggaaagggtgggactggaatggggtctaaaaagtgaaacagatttagatggtcaggaaaagggagggggcaaataatgggaggggcaacggtgttagtggaggattgtaggaagactggagacatgaatcttctgggagttaaaggttctccactttgacttatttctaactaacagaaacaactctatttcttccatagacttatttatgtaatttttaagtggcgagtgtacacctaattcattaccatggtgcttttgaaagcagagctggagatgcagaggctcgtcaagaagaggttaaataaatcatggcacagtgcacaggtaggatgtgacctgtgaatgtgaccttatttggaaacagggtcttttcagatcaaccaagtctagatgagattttgctggactagggtgggccctaatgcaatgtgactggtgtccttataagaagaggaaaagagacacagaaacggatacccagagggaaggcctcgtgctggcagaggcagcgatcggagcaatgcagctgcagccaaggcgcgatggggattgctggcaaacccagaagccagggcgaggcaaagaggaatcctcccctacaggtttcagagagagcgtggcgctgccaacacctcgattttgaacttctggccttcaggacagggctaaattttagttgttttaagccactcagtcggtggcactttgttataacagcctgaggagactgatgcaatgcatggattgtgttctaagagaagcagaatctggctttgggtctgatatctcaaatctctttttcttttttttttgagacagagttttcactcttgtcgcccaggctgcagtgctgtggtgtgatctcagctcactgcaacctctgcctcccgggttcaagcgattctcctgccttagcatcctgagtagctgggattacaggcacctgccaccaggcctggctaatcttttaaaaatatttttagtagacatggggtttcaccatgttgggcaagctgctttcgaactcctgacctcaagtgatctgcctgccccggcctcccaaagtgctgggattgcaggcatgagccatcacactcaccctctgatatcttacatcttacaggtagaaaaataaaattttaaaataaaatttgaattatgcaagtcaaaccaaagatgtcagtgaacatgccctgttaaattacatgtagcctagagctgcctccttaaatattttaagtttggcctaaagggttttctgtacattgtgaactgtaacagaccatagcctacattcgtgccagccagagttttggcaatcacatgtagccaactgttccaaccgtgttcaagtaagacaaatgctgagctgtaaccaatccaggtgtttctgtgccttacttccgctttctgtggtcactttcctttttctgtccatcaatcttcttccaccacatggctgagagctgggctctcggagtctactctggctcagaaggctgctcgatttgcgaatcgttcattgctcagtcaaactcctttaaacataattcggcagacgttttccttttatcaggtcctagagccaccagtcactgtttctggtctggacaaggctgcgtcacctacagagccacaggcctggttcactctccccaggcatctctgctgggttcctcctcctcgcagctcccagaaccacccgtgtccctcctgctccatcctcatggggaaggacctgtcctcctgtccctcgtgtcaccaaactcataaagccttttcactgtcctgtatgttaccacttaatgacaaactgtttaacgttcaaaccaaacataaaagtatgtaagtcccctctccccaccaagatctaccgtctgtcttggggacgggggtcctgccactccctctgggccccagggcacccagtgctgtcctgagccaaggggtctggcaaatgcctgctgccaccaggcaaggaacagaaagaacagtgagaggaccggctcaaggtcagggtgaatctgttcctctctgtggagagtggggcgcatgttttgttttgtgtgtccgggggaggtttaggaagtcacctattagagaaggagcccccttttccagggagtcccttcaggagactgagcagtgtgagtggaaagccctctggaagccccgggctggcacttgggaggcagctctgggtggaagcaggaggagagggttaggacccgaaacttaaaatgtaaaaggccctcacaacaaagtcccaaactcttgaaaaatagaggccaggtgcagtggctcatgcctataatctcagcatttcaggaggctgaagtgggtggaccacctgaggttaggagttcaagaccagactggccaacatggcaaaaccccatctctactaaaaatacaaatattagctaggcgtagtggcgcgcgcctgtagtcccagccactccagaggctgaggcaggagaatcgcttgaacccaagaggcggaggttgcagtgagctgagattgtgccactgcattccattccagcctgggtgacagagtgagactctgtctcaaaaaaaaagaaaaaaaagaaaagtagaatattttcccccaaaggtcttgagaagaaaaccctgctttgaggtggggtggggaggaaggagagggaagaggaagagtgggaaggtcctgatgtggtttagcagctcttcagagatgggggtgtgtcagcaggcaggaccacaaaagggctgccggcccatccggacccttctcagggccaggctccagctgcttggcactgagaaatagagacagtagccagggctcggggaggcctgcccggggcctctcagggggatctgcaggggcagagcaaagaagcctgtgtgctattttgtgtgtagtgtggggcactgcctggggccttagaccccagagtcatatccttcagtggttcctgcagcaacaaagtctccagcaggggctcgtcctggtcccacaatgcacctaggacaggctatctcctctcctgagagtcaagagggaatgttctcatcctcctctcccagcccctttccccactggacacagggccccttcagtggcacttcccgggggctgtgcccctgcttcctgtaggcatgtgcagggacctgatggggcagagctgaataggatgtggtggggggcgttttaggttcaaaaacctgtgccaccccccacatcctcatgacctgtgacagccctgcagagaaacccctctggggggctggggtcttcgtgtgtaaaggaaggggccagccacagagatctctaaagcctcctccatggacaatgctgaaaagtagctatgtccatccctgagcagggcatgatcaaaactagccctggccaggtgcggtggctcatgcctgtagccccggcactttgggaggctgagggagaaggatcacttgagcccaggagtttgagaccacctagggcaacatggcaagaccctgtctctattaaaaaaaaaaaaattggccagatatggtgacatatgcctgtagtctcagctacatggcgagattgcttgagcccaggagttcaaggctgcagtgagctaggactgcaccactgcactccagcctgggtgacacagcaagatcctatctcacaaaacacaacacaacaaaatgagcccaaactgcacccatgcaggcattgggcaaaggcccagaggaaacaggtactctgtggtgcctatctaggcaccactgatcaaaaccacaaacgcgcatgttcctggacccagtaattccatttctggggccatagacttatttgtgtaattgctaagtgtcgactgtactaagtgtcggcttattcattaccatggtgcttttaaaagcagagcctggagacgcagaggctcgtcaagaagaggttagataaatcatggcccatctgcaggcacaggcagccaccattcctgtcggaacatgacagggatcctcgttcctttcatctccaagatggagcggtaagtgaagaaagccaactgcagagccatctgtatcgaatgataccatttgtagttttgaaaaaaggaaagaaagtatctatattctgcctgtctgattttgcctagactatctctggcaggatctggaaacactggctgtctccagggaagggaacaactggcagggaggactttcatcatatcccctttttgatttttcaaactttctatcatgagaatggattatccattcagaaaattacttcttttcagccactgctttgcttttgagccaagaggctggcgaaggccatatttaagcactgacctgcttcctgccctgcctgccccgacgcgccccccagctctgtgcaggggtgtctcccacgaggaccaggaccaggacctctgtcctgtctcccactagaatcagggccatggctgtgccttcctgagctgtcctctcccttgctctttctcttcgagaagtttttccacttccaacattcttcagggatgaagcttagtcactgttgtgcaagggatgttcacagcccatgaaaactccttgctagttctttgggtacagaacgttcatctttcaagtaaacagtttaaagagaatgcaactgtgaccaagcccctccccaccccctgccgagagctcttaagagcacaaaccacggtgtccgctcctcccatggccctgtccccttgcaggccacccccgtgtgagtactggaatgatcctaacccagtcccaaaggaggtgagagaggtggcgggatgcaggagtgaacctctggggccgaggagatgagaaggtggactgttcatttgggggtgggaacacctcatttctggtggggctgaatgattctctatcattgccatctttccaagttcagaagctgctcccatctttccacctggccttcctgttccttccagagctggtgactcctgtggggaaaacaggtggcactctggactacagagggggaagggaaacttttagaggaagggacaggtgaaatgctgagactcacagtgtgtgcattagggatatgtgtgtagttaggggcatggggagtgaaccctcctggaacctaacatatgccctatctgttgactgatacccgaaatgtttttaagagggggtagagtcttgcagcatcaacactttttttttgttttttgcacgatgccaccctgtttacagagggcttacacactctggccccctctgcccctcacagatgaagaaactggtagctggagaaagttcagctacttatccatggtcctttagcgaataaatggcagggaccacacctcagctccactgtcctgactctataacccagacactttctgccacaatcaaactggggtatcaccgagagaaagaacatgaagacttaaaattacattttagctgtatgaattactctcccagaagtggggcttcacggggccaacaggaaggagagcttggatgacactgggtgactgcagagggaaagaagaggtgccacagaagagagaagggcacagagacggagtgagcttgggaccccatgtgcttcctaaggtgggacagccccatgtagggagggacaggcttcccccaaagagggttttcttccatgccagccaggaagggtagaccaacaaagaagtgacttctactcaggtttatgctattcaatcagtagagaaacaactgtcttatgagtcaggtaaggtgggtagtaagaatgattcctaagctttttttcttttcaatgttggtatcactattcataaataaaagggaaaatgggcaatgctgacacaatccctcattactttttttgagacaaggtctcactctgtggcccaggctggggtacaatggtatgatcacggctcactgcagcctcaaactcctgggctcaagtgatcctcccacctcagtctcctgagtagccggaactccaggcaaataccattacaccagctaatttttttatttttgtagagatggcatcttactatgttgcccaggctggtcttgaactcctggtatcaagtcacctcctgcctcagcctcccaaagtgctgggaatataggtgtgaaccgccatgcctggccccccattacttttaaatagaccaatgtatttcttaatcataaggtcaactgctgaactcaaccttgggtctgatcagtaaatgaatagttcctggacagcttccacgggccaagtatgctgggggtgttgaggaaggaggtgctaagatggattagagcaagtccctgtagtctgtaggagaaatggggacaaaaccaaaaaatcagccccaacaccaccatgcaataaagtcgagaaccaggaaagcaggggggagctcagggaagaggagagggcctgagggtgggggtgggacggtggctcagaaaccccaggaaagagctgggccccgatcctggaggaggacacaggtctgccccggcccaggggcctctcctaagggcccaggcagaactgggccatggccaaagtcacccaagaaggctctggccaaaggacagacaggtgccccctttctgttccttctgagaagacatctcctcctttttcctgctccttaaggactttgtttaggacgccgccagcctctgcagtgaacaatgcctttgattctcccagggcggcagccaggcccagtgaacagcccagcgagggaacagaaactgctcctggcagccacacagaacaccacgaaagggggtccagacactggggagccatgggctggtgacttcacagggcctggccctgctggcaggcgctggagaggaggaggaggagaacagaggtgccaccaaagggaactgagccctgctggaacggaatagctgtgctgggtggaaacagaggcctggccctcagaagccccaagctctaggtctggttttaccactaagttgccatgggctctgggacaaatccaccccttgccttggtaaaaataaaccaggtagaccagatgcctatctggtgcaatccggcccctccactgcgtaaatggaatgagctagagcctcattcctgcctgaggaacggaacgacaagaaggaagtaatgtattctgctgactgttgttacaagagccatgaagtgagaagagcaacatttccattgacactggagggaggctttgcttatacagggttttgaaacctcctaccactcatcagagtgaggggccaggtgttgttccctactttggagggaggatggcgagcgccgtgagggggaacggtggcccagggaggtgcccaacgaaagtgccacagccagagagggacaggagtacctgtgctgagtagctgtagcacacagagggatgcaaccagcaggcaggcggagaccctgggcggcgcgagaccctgtgtgacacaagttcaggccaggcaggtgacccagaacccagcctctgatgtctgcttaggactctgttttctcaaggagcaaacccactgcttcaatgttttggccctttctcaggtgccctctggcctggctcctacaccctctccccgcacggcccctattgcccgcaggttttaccttccacccctcattccagagccctaccctccagggccgctggagctgagtgcccagccctctgactccagaatggctctgggcagtgcaggcaactgcaggaggctgggggagccagggaatagaggggcagtatcctcagggaccctgcctgccatgcctccagcaactcctcttcccctcgtcgctccaggcctgggcggtaatgactcctgaaaccctgcccacacccctgggaaaagccccttcagaaccccagctgaatgtccttgtttcctgcccccaacgatacagtttccagcctccactcccaaaccaggataaggactggccagcaccgtggaagcagctgagctctggggccagaaacctgggctggaccctaagtcaccactcgccagctatgtggcctcagaggagtcagctcagaggcttgcttcattctttgaacatctgagctgcccgtgggctttgtgtgatgagtaagaggtaagaagcaaagcaccctaggacactgaatgataaggcccgtattcagtatgggcagctgccattgatagcaggtgacgtctccgggagaagaccctgctggtcggaagctcagagccagctctagcttctgccttgcctgggggacaggagtgtgacacacctgaagttcaagctgcagctcacccctggctgactccaccctgcggcccctccacacaggctcagtgtggaggtgagaaatcccagctgagccctctctgacaagttggggtctcctccaggcagtcctggccatagccatcccagtgcccccagccacagtcagccacaatgcactctggaagctgttcctgagggcgtggaggccagtccctggtttctcatcacctggagacgtaagaaattggaaaaagctggtcacccccaagacaagctccaggtgccacacgtcagttcattgaacagcgcctggaccagggtgactttaggtatcagtaccacttaggcccaggagtccacttcctctataacccactgcaggctgctgtttcatttgcacagaggcaggaataccctacacagagcgggcctgcctgagccttcagccatttcttctctttccccccagcccagggtgggagtggcgaggtcatcttcaagaccattctaccattctccaccctccgtgttggtggatgcattccagaatgatccattcaacctgaactattctacctcccacagccccagctgcccaatacttctctgaaagaagcctgtcctcagggccaccccaccaacacccctatcccatgctcagcttctctttgagaactgctgtggtagacaaatatttcagcttcagcacccctttacactcttgaaaaatagggtgtttaacatataatgagtttatggttgtcatttataaatgaattaatgtttaaaattttctcagttttaatttctaatataggctaggttcggtggcttaggcctataatcccagcactttgggaggccgagaagggaggggctgggagctcaggagttcaagatcagcctgggcaacatagtgagacccccatttctacaaaaaataaaaaattagctgggcatggtggcctgtgcccttggccccagctactcaggaggctgaggagggaggattgcttaagcctgagaggttgcggttgcaatgagccacaactgcgccgctggactccaatctgggtgacagaaagaccctgtctctaaaaaaaaaaaaaaaaattctaatatggtgaatattgattcatatgacccacagaaataaaagctccttgggatcctcatttttttaaaagtaacttctcagcaatctatattttttaaaacaaaacaaaaaataagtggcatttttactttttgcaaatgtcttgaatagctggcttaatcgaagatgctaggtttatgtatctgctagtgccctctttccctgtgagacggttttgctctaaacccttgtctgggcagtccccagtccctgtccccactgagtctaacccgacatgctgagtagagcatctgagccacagagacagttaggatgcttctcaggcttcagttctcaaacctggctgggccaaaagtcacctgggagcattgagaacacatgtgcccataggaccggaagatcctgaccgatggggccaggaggagcctggggatgtgagctgtgtgacgttccccaggtgacgcgggtggttggacatgttttggaaccattcatttaatccaatctccctatttcacagataggaaacttctaaagtaattgttagttcccattctttatggtcatgtggtccgagtgcctccatcctgtctcacagctcccttctatggaagagcaaattcccttccttctgagttcccagccacctgcttggactctgataggaatgactctccctgcagccaaggtcagcctcatgcagaaacgccctggaatgatgcctcgtccccgggtaccaggcgtttatgcagctgccggccaggccagctctcctgagctctgctgctcctttccagccagctgctttgagaccttgctctgaatgttcctaaaagacaagtttcacacccgcctggtgtcctccccaccccactccagccctgcccctgcaggaccccctctctcagcaggagtttctggactctggcccctttatagctgaatggccctggccctagctgagctcactctcaattcatatttcaatctggagtaaggtttcaggctgcagatttcggttctaggctctaagaatctgttttatgatcttttgtcattgaaactgttcaaaatatgttggaaaatatctgagtgatcttcaagtcaaagcatcatggtaatatggaaggtgaaaaaatatttctatttaaaaaaaaaactttcaggaatttttccaaggttattctcctaaaaggaatccggaaaatatccagtcttatagggctttgtatacccaataacattctgcacctagttatgaaatagttggctctagcatatgggtatttacatgggaactaacaaaacaaaacagaaatggtggtgcaggggaaggaaaggagaatctcacaggggctaattttaaatctgtcccaactctgacaatgtggtcccagcctctgctgtctgccctgttccttcttcacgcttgcttggaggtcagagttctacatcatggacccaaaacgtaaccctagatacttcgcttgggcaaaagacaacagcagatatgcatcttgatgttgccacttagaaagcagtcctggggaggcacaggggaggcccctctgctgctttgtgagagagagaaattctgccacagaacttttcccatatacaatggtttcggaaaaacaatttgctaataatttgtcaatgaaagggaaatgttagcagcctcagtccctctaattatcagtatttgtggaatcacaaaagcaacaggcattgtttggtgctgtggagatgaactctgccgaatgtgatagtctggaatgggccagcatgagaatcataggtggtaagaatgggcatgaccttggacaaacatctcagaacctcattttcggtggaggaagtgcaggctctgagaggtgaagtgtgtggccgaggatctaccccccaccccagaagcaggtccacagccatgactcaggtcttcaggccgcagcccagggccttgctccattccaggaggtttctgacggtgacctcatccctgtggaatgttggggagaagaccgtttgtatgggcgacaggaaaaagcacacggtcgcaccaggcgaggtgggtgcctcaggtcagaggtgtatctgccttgggctgcctctccgtgtccaccctcctccccaacggggctccctcggccagctgccaagggtgtatagggtggagcgggtagtggaaggccaagacttggcactttgggtttggaaggggagggaggaggaggaggaggaggaggaaatgaggcccccccccgggctccttgctgagtcagcatggtgactactgtcatttcctagaaggaaataagggaaggacaccaattcaataggagacctgggggactttcatactctcagctgatgccagggtgcccagtgagcaggggaaaggcttcctggccctggcggcaggatggggccagaatattcctgggcaggagcccccccaggtggcccatcctgcctgagcatgtctgaacatgttcttaggtcaggactagagttcgagatttcagaaatgtcattctaaccttgatctcttcgagatgcctgtttataacacagcatcgttcatgccaattgtctggcaaagccggtatacacggctatcgctatgatgtaaaacagcagatctcatgtgagggtaaacttggaatttaccccgatgagatgcggtgtggggagggtccagtggctgcgaggccctggaagcatgcctctttcagggaggcctccatcatcagagcttccgtctgcaacgtccctgccctgtgctggccagggaactccgcggcgggctcccccactgtgcccgggattcggacactgcttgccgcggagtgtttccagtccctcttgaaattcctggttgttgacaatttgtttattattctagctcttgaggaaacttcctaaaaactggggaagaagtagttcttcaactttcttgaatctcaggacacttggatcatctgacgaaactgatgaatgaagcatgggtacacagatttctctgtctctcaaatcacttcggggcccttctaactccccaaaagtcaggttttaggaatctgtattccgaggggtctcaaaatgttcacgtggttcccctctcctccagggtggccggcctccctgttccatcttctgagaggagctatacccattttgcaccctgaacctccaaactcagaagtctctgaggagccctgaataggagaaaatgtggctgaaaatgaagtggaaaatcagtgtgataaccaaatcaagatcacgcctcgctgggaccctgtcacactaaagcttccagagcatagtcgtttttaaaatctgtaatagtacctggagttttttcctgtgctttctataattcagctctttgagtctgctctgaacccttggtggtagctcactgctcatgaacagatcccctcctggggggctccagtggcctcccacaatggtcccattcctgagctgtttatcctcactctggagggctccctctgatcatccaggctcacggctctggatgaggcacaggtgggaagggctgtgggtgatgcagggagggctttcagtcaccatcccctcctggaagtgtatcccaagccatttccaggtgtacagctctcaggggagacaagaatgcattgttctacctggcacgatggggtgtgggccacgtggggtatgggccacagaagcacattcccaaacctccactttggagagccacgtacagcgaagcaggagaaggcggcagaggcggggatggggagaccgtctgtgagtgtggttcctgcccggctttccccttcccgccaggtctcccaggaggccaggtggcggctgcagccggtggcagacactcccttcctggggtgctggctgcagccggctgccatgggactccaaccagggctctcctggggttctgttgactcaacacatcatctgacgccaccccggcaggccctctgggtgtcaggtgccagtgagacgggttggggaggctgggacggtgtccagactgccgcctctgccccagagctcgtttccatggtgccgttcccagctccaggagctctcctcattcacatcatgaagggagaggcagggatcgtgagctctagtggttgtctgcctccagtgattaattggtacgattctccacggaggaggaagagaagaggaaggaaagctgcagatgaaagggaaataagcgtctcgtggtggaaacaaaagtattggttgcatcctttcaaagacgatctggaatctcaaacctagggtttacctctgcccctcgatggcaacaacaattctgggagttcagggccatgataaaaaatgacagcatcacacctgaattgctgctagtgtttttaatagacaggtaaccactcatcccgagggaggtgggaaaggagccctcttgctagggagcttggaattcctaatgctgcctgtgtctgatggacagtacctacccctggtagagctcgcttcgcggggagggagaactcagccctctgtttgcatgatctgaggctctggaaagccccctgcccccttccagatacctcatctacttgacaaacttccaagatgccctgcctcccctttctacacattgctcttccccgaaaggttcctgctctgttattcttggtcaatctgcagaaggcaggccggatactccacaaaggacccaagagaggagcagccgttaggaaggtgcaaggctgggagggaaggacaggaccagggttcccggattcaattgtaccacatcatacatgttgcctccatgcaattttctctttagtgccaggtttctagaatcagtgcatgaaaaatgatatctgaatacggtgcttaggggagccgggttttttccacttctgattcactccacagcttcagcatctattgtcagctaagctcatcttctgtgaagccctcactggtttctagagtgaatcattcctccttttcatgcacttagcacattccaatgttatcaaatgatagagtgctgggttgtttcctgatgcacctcgggtcttccactaagcgtgaatggcagtgagtctcgcttatcgctatcccatggggcctggtgcactgtcccagctcaagaaagatttgtggagcttgctttgtacatagtgctcaacaagtagacaaatctaactttaaatcttaagctctttaaaatacgccgttaagaaaatgaaacaagaaacatgacagagagaaaacacagctatccctctgtgtctgcagggaattgattccagaacccctctcaggcaccaaagtctaggatgtgcaagtccccgatataaaatggtgtaatacgtgcatatgacctatacacaccctcctgtatactttaaattatctctggatcacttataatacctaatataatggaaatgctatgcaagtaattattatgctgtgttggtttttcatctgtatttttattgttgtattattatttttattattttttcccctgaatatttttgatctgaattggttgaagctgaggaggtgaaacctgcagatatggagggctgaccgtattgcaaaacacatatatgataaaggacttgtagcagagtatataaagaactctcaaaactcagtaacaacaacaacaaaaaaaactcagtaaaaaaaaaaaaaaagtggacagaagatttaaacacatacttcagcaaagaagatatacagatgacaaataatgatatgatattcaccatcattaatctttagggctatatacattaaaactacaatgaaacatcactacacctactagaccagctaacgtctacaaaaacctgacaatactaagtgctgacaatgatttggaacaacaggaactctcatttgtcactggtggaaatacaaactagtatagccattttggaaaatagtttgacagtttcttctgtagttaaacatacatttaccatacaacctagcgatgccactcttagaagatatgaaaccttgttcacacaaaatcctgaatgcaatgttttcagtggctctattcatagttgccccaaactggagacaattcaaacatccttcaactggtgaattaataaactggtacagcactttgggaggttgaagcaggaggatcatttgaagccaggagttcaagaccagcctaggcaacatagtgggaccccatctctacaaaaaattaaaaaagttggctgggtgcagtggcacactcctgttgtcccggctgcttgggaggctgaggtgtgaggattacttaagtctgggagttcaaggctgcagtgagtcatgactgcgccacagcactacagcctgggcgacaaagtgagaccctgtctcaaaacaacaaaaaaacaaaaaaaaatgaaaaacaaaccaaaaaactggtgcatctatacaatagaacactactcagtaataaaaaggaaagaactcttaatatatgcaacacaatgaattaatctcaaatgcatttttctaagtgaaggaagccaggtccaaatatatacatactatatatttccatttatacaacattctggaaaaagcaaaattatagcggacagaaaaaaaagtcagtgtttgctgaggatgaggggagaaattgactataaaaagggatgcggaaatttctttgggtgttggaattgttctatgtcttgacggtggtgctgattacacaactgcagatgtttctcaaaactctcagaatagcacatttttttttaaaagggtgagttttactctacgtaacttatagctaaataatcctgacttttacaacagtgccctaacatgagttcgggggggttgtctctgcaatgggggaagcaggtgcttttcccctgggccttgaaggagggacaggcagggctcggatggagacgcctcagcatgatggtggaaaccttgcctccgccttggggcccaagacctgctcacataaaaatagcagctgaattccctctccctctggcccaaaggtcatctcctgaaggtgacagaatggagccactaccagggggcgggggagtgcgagggggaaggagcgaggtctcagaggctcaggcaacctgggccctgtcacccagacaactccctcccctcctggagacagctgtgctcacacagcctgtaccctgccttcccctgctgttgggagaaggggagggggcaggagagagctgaaaggttaggctgggagcagaaagggagatcccactccttcacccgccctcaccttccaccagactcagtcacccggcgctcctgaggacaggggtctttggtatatctctgcatatccctgaaaggtgtggacaggtcaatgagtcttctctacagcggctcttggcacaggtccgaacatgcagaaagcctgatgatgtcctgctgcccagggcaggcctgagacccgcagcacaggaggcccaaggcggccataaggagacccaaggccctccgaggggcgcacgaggggttccagggaaaagtgagaaggtgaggccctcaccaggtggctactcatcccagagaggagtttgcaggcctgaatatgccccacccgtccctcctccaggcccatcacctccccgggccatcagcagccacgctaggcccacgagagggttctatgcaatggctgcaccttgagagcttgctttatttttagctttaaaagttgtgttttaaagacatctatatactgagtataaaaatatttacaaatatccaagaaatatgttagtaaaactttctgaaggctgtggtctgaatgtgtgggtccctgccaagtccttatgttgaattctacccgcaaggtgatggtgttaggaggccgggccttgggaggtgaggagggtggtgccccatgcccttacaagagggaccgcagagagacccctcctccttccaccatgtgaggacgcagccaggaggagctgaagcaggtcctcagcagacacagaatctaccagcaccttggtcttggactctagcctccagaactgtgagaaagaaatttctgttctttttttgttttgagacggagtctcgcactgttgcctaggctggaatgcagtggtgtgatctcggctcactgcaacttgtgacccctgggttcaagcaattcttctgcctcagcctcctgagcagctgggattacagttgctcaccaccacacccagctaatttttttctatttttagtagagacagggttttaccatgttggccaggctggtcttgaactcccgacctcgagtgatctgcccgcctcagcctcccaaagtattgggattacaggcgtgagccacagtgcccagccacaatttctgttctttataagccacccagtctatggtatgattacggcagcctaaacagacgaagacgctgagttagctaatttgttgatccaaacagtccactctttttaaacatttatttttgattttgttaaaatgcacacaacctaaaattgaccatcttcaagcgcacagttcagcagcattaaccacactgctgtgcagcccccaccaccaccatctccagaaccatttcatagtacaacactgaaactctgtcctcataaaaataactcatttctccccacctgcaacccctggcaaccatcttctacttcctgtatctgggaatctggccactctagggacctcatatgagtaaaatctggcagtgtctgtcccttcatgactgcgttctctcactcagcacaatgccctcaaggttcatccacaaggcagcacctgtcagaatctccttccttttgaaggctgaatactattccaccacatctacacacagcacggagggctttctctcacaattccctcccggctttgccatcgctttgctattgctctgtgtctcccaagagatcgctgcccctcctaggtctgcagcttccctttcctgtggtgacagcaactatggttgctgcctgcatggcctggtgtccccatgtgcccccaacaccgagggccagagcaaggagtaaggacatccgatgcaaacaccgcacccacacgtttcctggggatgccccagtccctccgggtcagaatctgtcagcctgtgcccatgcctgtcccttccttctgggccacggtcacaggacttgggtcagcaggcccgggcagggagggagcccgggacaacgccagacattcctgccttcctgcagccaagtttccgatgtgctgttggaggaatcctgccaagggtaatgtgacatttacatgatgcctggtggggctgcccagtgacataacaggggggttgggggtgtgtctctgggcacagagcctgcagcccggcagagtctgatgacactgtgttgtgtaaattgaagcgacagtcacctgtttctctaagtcatggctcaaacctgtttcctcttatgtgaccataaaatcacaccgcctgtcaccttgatctttgggactcttctgtcttccttctgaataaagctacttgataaacacccatccacttcctgcagggggagaaggccaaatgccctcaggtgcattcttttgagagagtccagagagcatgagcccagccagaagtaggcatttgtgatggcctttctgtgcacttgtgcacacaaactttctcgtgtgggtgccctaagtgccggcattgtgcaggaagctgtgttgggggctgggagcacagtggtagcagacaccatccctgccctctttcaactgattttgcaaggacttcaggaacacattctagcacaactaactagagctgctcacttatgagcagagcctcagttcagccatcagtgaaatggacaaatcaaataggaactcttgaatgggccacctcccctgggcagcagggtggcgttgcttccaaggtgtgcttaaagccggctctcttctttgtggtctgagcagaagctgtaaggctaggccctggccttgttcttagctgtccctggcctacagacctttgaactaatcactcttggtggtctgaattctctgtagacaggtggaaaccgtaggcactgtgtcctccagacctcagcacagcaagaacagtctggtgttcatccgggcagaggaagcagaccccaccctgtgtttacacgacaccagctcttcaggggtccgagggggcgggcctgatgccggcataaggtttgatgttgccagctagaatcgccaacacatccccggaagcccagtggcttagcctcctatcagtgcctcctctgcagcccctgccagggctgccaggagctcagccggcctttgttctatttcaccccaaccaaatacctcctcctcctcccttctccttattcgttaaaattcagcgcatgatactggcaagcttcagccgcagctcacagcactttcagaggaaaacgtggcgcgcccggggccttctcacagccatcgtgcagccgcctgggcagctcccagctccaatggcaactggtagcatcaggagagtatggggttccccagtggggctccggggcagcgcaacgccacaggaccttgtggtggatgtggcaaagcatctgctctggtggcctggggcaggtgaggaagtgagcgcttctcaggagcagagccaggtcgtctctgcaggcccaggcctgccggcgcctcagccctgacgccatcatctctcctttgactgagaacaaggacctctttccttgcctaaatagcctacggctaagaggaaatcacccccagttacgagaggtttcaggaagccccccgcaaccttccacccaccatcatcaaactttcaaaagcagagagtctgggatttgaagcccctgtctgaaaagtaggtttcagatccatcggaaggcagggtcaggccaaacctctcctctcaagtcagataaaaacgatcacaccagggaggagaggcctgaaaaggggcagctgaagggaaaaagagctggagagtggggagcagcccggagtgtctcctctggctgggaggggccctgtggagctggcagcagcagctcttgggagcagacagaaggccgctccttaggaccaggcgctgccacctgcaggctcaggccctgttcacctgccgcagattccccgagagccaggcagaaaaagtggaccctgcccccagagcgcaggcccagggagaggcaggcaggtggccagtctgagtcagcgggatggaggcgcctggcatggggaaggggtgtgtagcctgggaggggccttgggcgggagcatccccggggagagagctggagccagttcccttaggacacatgataactggcagaggaagagcagctgctggggaacggggggtggtgtgtagggagctgcacaccctggggtggtcaaggcagaatgggcaccagctgcagcccaccaggcctgctcttggggtcccaacaggcagggagaagtggtggacctgtgtccgagcatcagggggcgctgcaagtgggcatgctgggtgcccagcaggggtaccatcattccccaggggtgtagagagtgggccgagcccgggagccctctgaggaggctctgccaccacctgtgggacagcaggaggagcttgaactctgtggggacttggagcagaaaggacccgccgctggaagtgagggtcacaggaaaggggaagccccggagcccctggtccttggcttggagagctgggtacacaatgatgcccaaccctcataaggtccacacatgacagggtgcctccaatccactgtggacggtgacaggtcagcaagggtctgacataaccccttagctgtggggggcacagagaatgggcacggctgggatacagtggtgcgctgggtgcagggagggggtgtggacgcagggaggaggcaggtgccgggagcagacatcagagcccagaaaatgccacagaaatcgagcctctctccaccctgccttccaacctcatccacccagtggctcaaggctgccaggataaagaaggacgggtgtaacgggtcaaggcgaatccaagctttgaggtgtgcaggtacagaggactcttgtgtggtccccacagccatgggtgcacaggccagtgggtgcattcaggggacacggcagagggaggtgcatttttgtgctgttttcctctgtgccagccccctgggaagcaggcactgttgatgccctgtccctaggtctcacttctgagttcgcctgcagctgggaggcagttcctgtgggcactggggcttcccacccacctcaaccctgcctgagagtttcctctggtgcccaggagctccctcgggaggagcgccgccagcttggggaactaggggtttggtccccacagggccacctgggctaatgcccctgggggcacattcagccagcacttcaccaggtcccttgtgaggcctcagctgtccccactgtccctctgagcctcctcctggtttttcccttcactgtcccatcccccaccccctcgcctgtgcttcctgggatcatcgctggtatggtttaggtgttttgtcccctccgaatctcatgttgaaatgcgacccccgagttgaaggtgggcctggtgggagaagtctgggtcatgggggcgaatgtcgtggtgctgtcctcgtggtagtgaatgagttctcgctctatgagttcacacgaggcctggttgtttgaaggagacttgcacctcctccctgtctcttgccctctcaccatgtgacacctcagctccccctttgccttctgccatgactggaagcttcctgaggcctcgccaggagcagacaccagcaccatgcttctcctacagcctacagaattgtgaactgaaatcaacctcctttcttcataatttgcccaaactcagatatttatagtgacacaaatggactaacacaatctcccaaaccaactccctgacccttgtcaccagctctgcttttgagggaatccacattacaggcaggggaatgggtgcaatggataccagcgtcagccccttgcagacctatccagatgcaaggacttggctctttggaccactccaagccaccctgagatgccacgtggaaccctaggaaaacccacctctgcaagaaggtcctgaaatcaggtaacttctcgctacagtgtaaatgactgataggctcaaacgggccgtgggagggtttcaggacagggtacaggaaatgacctgcaagtctgcagagccagtctgcaaactctggggagcacccctcaatgcccttaggccacctttccttctctgacctctgtccccatccctgccccaagttgtgtctctttgacacctgggatgtaagctgtgaaagctaaactgcactgtagttggagactcttgagaaaccgaatgaacaatatttctgaagatctcccacgaaggttgcctccctccctgcggtcaggctgcctgcaggcctagtcccagcagatctccgggagatgctgactgctggccggatgcctgtgtggttacgatccggttacatctcagccccctgctgagaaagaggcgctaaggtggccctggagccgtgaattcactgggattgagatcatctcggcgactttatcatgaaggccagcacaggaggcccctccttcctgttggagatgtttagttttatgattaagaaatggcaaagggcctttcagactacttttgctttgaaataaatcagtgaatcaatgagatgagaagtattcactgggcaccggctgtacagggaagaactggaagtgggatatgcagtgcctgggcttggggtaacagaacccagcctacgggccagaaagaaatgcatgagccattaagacagtgcaggaagcatctgatggaggacacgtcaatcttttcatcaatcattgaaagcaggacgaggaggctgggacacagcaaggtgctcaggccctcagaggaggcagtggggaggttcttgatataggctggtctttaagaaggactgggactaagataaactggggtacatagcggaggaagaagggagtagaggggcagtgctctgctgccacaggcggccgcagatgggtgcccccacattgcagaaacagcctcaacaggagccttgtgtacctgccaacattttgctgcatacaagattaatgaaatagttccactgaaatctggtgatggagttctcggcaatgtggtttttgtcctgtcatctcataggaaacaggtctttgaataagtcattgcatcattgcaaaatgatgtttcctccccaacaagggaaatcgggggtgacgtttagcagctccttctgcagcagtgttttaagttgagtggctagaaaagaaagaggcgtattatacgccgggctgtgttctgggtgctggggacagtgaacacgacagagaagagcccagccctcgtggagctcaggtttgtagactctggctccttggagtatggtctgaggaccagcagcctgtttgttagacacgcagacctccaggcccccaccccagacctacggagcctgaatctgccctttgacaagactcttcagtgaccgacagacacgtcagggtgagatacgcggctgtaggccaggggttccgaattttggcaagaatcaggaccccctttttaacgcaggcttgtgaatctgtggatttctgagccccaccctcagagattcagatttgggaactgggatggaggtccagaaattggcttttctgatgaggttccaggtaatgccaggcctgccggtctggggctcacaccctgagagccacctgctgtaggagatcatctgagttctgggagaagactggggctatctccgccacgcgtcccaggccctggagaagctgacggtagcttccaggcttccccttatgtggccaggccatagttcccttaacctcccacacccatcccctccacacggggggagcctggccttgtgccgaaccccaaataatcctcagtgcttggcctgcccgtttagaggtcaaacatccatgcagaacccatccagcctgcccgggaaatccgagcagggatcacacaggatgtcccaggcatttccacacaggcgagaccacagagcattatgcagccttgatgtgccaactgagtcatgcaatgtgctgcacacacgagcacccagcagacgcctgtcctctcctcccctcagctgtcaggcacaagagtccacccccttccacctcccactcctcaggggctgccccccagggaagccccactggagcaggcacctgacccagacctgaggcctgcgtcactgggccgggggaggaggaggtctgaacagaaacactaaattagccaccttctccctccagtctctacctgtgctgtccaagaggcagccactggcctcacatagctatttctttataaaattcaagttcagctccttagttgctgttatgggttgaaatgtgtctccccaaaaagatacaatgaaaacctcaccctggtacctgtgcatgtgaccttagacatagggtcattgcagatataatcaagttgagatgaggtcatactagggtgggtcctcatccagtggccggtgtctttataaggaggaggaaacgtggacacagatacacagggagatggaagctgagattggagcggtgcatctttttaagccaaagaataaggattgccggccgggcgtggtggctcacacctgtaatcccagcactttgggaggccgagacgggcagatcgagaggtcaggagatggagaccatcctggctaacacggtgaaaccccatctctactaaaaatacaaaaaattagccggcctggtggtgggcacctgtagtccccagctactcgggaggctgaggcaggagaatggcgtgaacccgtgaagcgggggttgcagtgagccgagattgcgccactgcactccagcctgggcgacagagcgagactctgtctcaaaaaaaaaaaaaaaagaataaggattgccgagaactgccagaggccaggaggcaggtggggagcaggttctccttcagggcctgcagtagaaaccaaccttcccacaccttgacttcagccttctggccggcagaactgtgagagagtcagtttctgctgtttgaagccacccggtgtgtggtgctctgttgtgtatggtagccctgggtgctaatccagctgcactgtccgtatttccaatgctcaacagccagatgtggctggtggctaccaagatggacagcatggatacagaacacttccccctgtgcggggagttcgattggagggtggtgttctgcagaatgctttctaagaaagaagcaaaggttaaaagtttaattttcagaaaaagttgctggggtagcccagttgcatcttccacatcctttacatccctagtgccggtcccccaaaagagagaggaggcctcatcatcaaagggacatcagtaggcacacactgactctcttccctgacatgagaaagtccacctagacattcaggccggagctttcgtccatgctgacagcagacggatggggatgcaggtccacactgatcctgagagtcccacccacagagggagcccccacggcagtcttgccaggtccctgcccacccgcttgccttccttcccctatctcctctccccatctgccaggaagcccatcagggcactgccaggtccgctctgtacacagacaaatgcaactttgaagtttcacactcaccagttggcaatgcattccttaggatggaggcattcatagtcccaagaatcccaagttaaaatactctcaggagaaacaccaagtcctgttattggataataagactctagcatgaattaatgatcagagtgaaggcctggggggcacagcccctaggatagcaaagttttggttgaggggatgaggtgatggcaaggagggcgaggaccagagcccaaaggtctctcctgggaagggtccaagttcaggactgtaggtctggaatgccagaagctgggggtgatacctctcgccttccagttccgagaactggagcaagtagagtgaatgtcaaactgccaagggcacgattttgcctctaagcatccgtccatgtactactcacctctgctcatctctccagggacccagcctctatgctgggctccctaacctgcctgcccagggagaaaagggaacacctggcagaagacacctctgccagcccttcagcctctcacattgcctgctgctcaaatagctcatctttcttcaaggccatgatggcttctctgactcactcatcagcgcgcgcgaagcaaagaaggaaagaggaaaagcgcaccttctccgtcacagtgaatggcaccctgcaaaggactgcgggtgctctaagaaaggaaatctgttttcagagctcctgcagctgcttttcaatgtgtcttcagtttattttaccaatgagcaaataaactggtgtttcccctgcagtgtcttctgcccagatagcagcgattctgctctccgctgtggccggagcactggatggctccgtcaagccctcagttgtcttactgatgagaacaactcaaggaacttctcccacatcatctggccacttgggctttaaaaaatgttttatggagcataatatagaaaagtgcacacattgagagtgtacagcttgacaaatttgcacaaagttcatgcatccatgtaaccagcacccagagaaggaaaggaatgttactacccacatggcagcccccttcaatctccctgccaggcaccacctgcctcctcagataatcatcatcattctttttctatttaaaaaaatttttttggctgggcgcggtggcttatgcctgtaatcccagcactttgggaggctgaggtgagtggatcacaaggtcaggagtttgagaccagcctaaccaacatggtgaaaccctgtctttactggaaaacacacacacacacacacacacacacacacacacacacacacacacacacacacacacacacacaaattagctaggcatggtggcaggtgcctgtaatcccagctactcaggcggctgaggcaggagaatcacttgaacctggggggcggaggttgcagtgagccgagattgcgccattgcactccagcctggatgacagaccgagactctgtctcaaaaaaaaaaatgtgggtacatagtaggtgtatatatttatggggtacctgagctgttttgaaagaggcatgcaatgtgaaataagctggtcacggggaatgggatatccatcctctcaagcatttatcctttgagttacaaacaatccaattacactttttaagttattttaaaatatacaattaagttattattcactacagtcaccctactgtgctatcaaatagtaggtcttattctttctaactaatcttcatgattctagcatcatatgttttgcctggctgtgtattttgtgacccagagctgcacattttgtattcttttgcttcaggcttctcttgctcagtgttggttgtgagatgcagccacactgctgcatgtggctatagactgtttctccacattgctgtaggaggttccattatgcaaatctaccatcatgtgtttaccatttcgactgctgatgggcatctgggcggcgtctactctggggctattataaatgatgctgtatgaacattctatacatatgttccccagaattgctgcttgcttttagttaatgtatttattcagcacagaagacattatagagagatgaggaaaggggaggggcccaagtctgagcatttgtggaacacctacaatgtgctgggcctgcgtatctactgcaatccacgcggcacctaccgggtggggatttacaactctctgcctcccggggcgccacggcttggagaaagagagtgagtattgccaagggaggcacagggagagcgaggctgctcagcggtgcggcaggttttgaacccaagtgtaaccactacaaagcctatgatttagtggacagaccacgtccccaaaatgttagcgcttaaaagtcctgcccctgctagcctcagcaacgggaataaaacagccatgaacgaaatgaggtttctttggtgtgtcagatactatcttctataggagacaccactgaaattaccagccaaatgctgaacacatttttgacgattagcaagttaatgagaatttttcaaccttctgataaaacgtaaatgcaattgagttatacttccagctgctctgaacagaggcctggtgtctgaaacgtacaggataaaatgttcaggttatcaagctgctctggaaacccctctggtctcagagttggctgagaatatcaggctcccttttcattcctactgataagcccacttcctctcgagcaacaccaaggaaacaagggattatggtgttttttctcttttctcaatcgggttgtaaaacacacacacagatgtacatggattggaaattaatccagccgggaaagttggctggcaagcactcggtcccaagcaggatcaccccggtatgccgaacacgcagccggcatctggctgcaagcatctgtctatcacacacagctgggcgaggggacagccgactgtctgtgacagacactccttagggagacagatagggggagggctacgtcttttcagagagaaagagacgtgagaggtaagcacagttttcccaaaggcccataaagaaagcaattctatttgtccaggatcagctcactaaggtcctcctagagcagggtgttcgattggagggtgctctgctcttcaaattaatttcagtctccctgcttaactctccaggctctggggtcccctcctagagcaagagtgttgactcctccttacactgccctctgcaggttggtggcacttccttgtagaaatctcataagtggcccttcttagccgatctcatctcacccgctgcgttttatttgacattcctacacatgttttatgatttcacatccccccgccccccatctgtgcacctgcaactcccaagttcactgttgttgagggtagaacttcaagccaggagcctgggtctcttgagtcttgctcatcagggttaagatgaaacgacaggtatgtgaaaccatgttgtaccctgcaaagcatgttgaaaatgcttcccggagtaaaaggttaggtaacacaacttcagtgtgactcagcacagcagatatgcagcacagagaagaccctgggacatgcccaaggccacacagctggctggtgtcagtcagagctccagccaagccttgaagtctggctctggagaccaagctcctgactgctgtctcctcctgcctctttgccctgtagcaccaaaggagaaattaatctttcctcctaggtggtaatgactagttgcaatcaaggctgcagagagacccactcatagcccaggactgggaggtcaggctcctgcctcgccctgcctttaacaagtcaaattctccaagacatccaactcatctcccagactgtgaaactagggtcccaaaagggtcaggactatctccccacctgggacagtgccttgctgtaaagattaagtcccaggaagacaccgagatctcccaccacgaggcttcttgcagaaagccagagtacgagcaaccagcaccctgacctgcctcctgctttgagcaggtgtgcactggaaatgcaaatgatggtttttatagaatttcaagctgaaatcttctgactttcttccaaggaatgtattcaaaggaaagatgcaaacccattttggctgtctcccagactaggcgttagctgtggcagtaacagcagcttcagcaaacgctcaacacagcctgagtctagaatacgttccggcaatggcttctgcttctccaacctgagccggaggccacggtggttccccatgcatctcagcccaattggagccacctggcctggccagggactagatggagtagggcactcaaatacaccctccagaggcgtctaccatgagggaagagggtgcctctggcccaacccaacgtcagcctcaaatgttcggacctgcctgcagtcatgcagaggaggccttccccctcggctgcgtcctgggtgccccagccttactgagctcagccctgtctcagtttcagaaggaaatgctcacaggggaccacaagtccccaggacatttaacacctggtcagaggacaagtccaagcacctggatagcaactggaccatgtcatgaaacccagtcctcctccctccgacgctgcccaaacttgagctgccgttgtccaggctagacggcatcctggcagcaggagaatgaacagcagtgtcccattcattcaacaggtgagcaggggacctcaataaggcaagtccctgataaggcagtccccagaatggagtgtggagcagggtagctgaggtgtggctgcaaattcctagcaggtccctcctactaaacggtggtcggagaagctgctatataatgaccgtttagtgacattcctagaaatgtttcttcccgcccttgagcctgcatttcagcttccagagctccccaaacctcgggagggtcacactgttggctctgggggagaggaatgggaatttgaaggccagaggctctctggctcgcacccatcacccgctctcctctctggtggggtgctcccgaaggtgactcagttctccaagccaaatgcagccatctgatgtcaccacctcatctccagaaggagtcctgagggagaactgggtcctcaccactgctgcagtggcaaacaaaggacacaaaaataattgagtggctggtcaagaaccaagttaaaccggccagccagggagctgggcctacgtcagtagggggctcagaatagccacagagcccgtgatgtgcccaactcaccccggggccaccggggccaaagaaagcccaggcatgagccagcaccggccccaaggcaggaaagcccaatagcgaacatggtggacatctacccagagaactctcggcccaacccagacggggcaggggaggacgcacagagaaaacatgctgactgtccacctgcaaaggcccccggacatgaccactgggtgtgaactggcccccgctgtccacaaggggggcgctgtccccgttgaaagctggggaaatggaagtaggaagagatgaaggggcttgcccagcaacatttggctgacctggacctgaacccagggttgtcaggctccaaacctccaattgcttcttaccctaaactctccatgcagccagctactgtgaggtattgtgaaaggaaagtcggatgaatcttattatttcttttttggcttactagactctgaaaggccgcattagtgaactcgggactctaataactcctggtgtcaggccttgccctcagaatgatcgtccagtggggcactgtgtggcccctcaaacccccatgccaacctggcacctgccagccatcgaagagaatagaagcaacaaaaaataaaaatagtaaatgtaccagtatcttctatgcagcgtaaagatggttttcactctacagccttctctgtttagcaaaggaatgcatttgtaacgaaggattttcagccaccgagccagccaggtaaagggaatttggagccagagggtcctcatggcatgcctgtagggtcctggcaagtgaggatacactgtccacgtggagggctttcctgtcgtaccccgtgttagccatgtaatgtgggcagtgaccagaggggatgacaaaggtaaaatgtccagcaattcacagggaacttgagcacagcaaagtcactgggtaagtgcagtggccggcagctgcctctctggagtgcccttggtgaggcagggccttttaagttccatgtgagccaacagcctggtgctgccacctgacactaaaccccagcacaggttcagctcggggcacccatggacagagctgaaaggaagccaccagggcacgccactgctctcgtcagagcccagcagaccagctacctagttctgtgagaataccagaagcagaggggccggaaaccatgacactgtgtgacactgtgtgatgggcgatggtgacactgtgacactgtcacagtgcatgacattgagtgacgtgtgtgacactgacacgtgatattgagtgatatgacattttatgatggtatgtgatattgtgacaatgaacaatgtgtgaactgtatgacattgagtgacactgtgacaccgatgtatgaactgaatgacattgtgtgacacagtgttgtgacactgacattgtgtgaaatcgatttgtgacaatgtgtgacattgtgtgacgatgagggatgtatggtactgtatgacattgacactgacaatgacgtgtgacattgagtgacgtgtgacaatgatatgcaatgtgtgacattgatgtatactatatgacagtgacattgagtgatgtgatattgagtgctgtttgtgactgtgtgaccctgcatgacacttggtgatgttgagtgatgacattgagtgatgtgacattctgtgacattatgtgtctgtgacatgagattgacactgagtgacctgtgtgacatggtgacattgagtgactttgatatttgtgacattctgtaacattgagtgtgacagtgacatgtgatactgaatgacgagtgacactgacacatgtgactgtcagtgacatgatatatgtgacactgaatgacacatgtgacattgtgtgacacacacataacactgacactgacaagtgacattgcgtgacactgagtgaagtgtgagacattgtgatattggatgtttcttacactgtgacacggagtgatgtgaagtgatatgtgtaacattgacagtgatgtgtgatgctgtgagtgatgtgtgacattgagtgacagtgacgagtgacgtgagactgacattgagtgatgtgacagtgacagtgacatgtgatattgtgacactgagtgacgtgtgacactgagtgcctgggggactcaatggccacttcgccttccagagggctttcaggaggaaaagcatttacagtagagccccacggagcactctcgagtctagaagggtggccggagcccagtgaatagaaactgcactggtgtcttcagctcagttccaagtcggagcagccacctcagcagaagggccggcctttgggagccgcctctcccctgagctgaggcttggatgcaccagcagagagatggcagaggcaggtggagactcaggaggcacctctcacttcaggattgaaaccagaactctaagtccgggactttctgccacccgtgccccgcccagcctgtctctatctcagtgcgtggcacccctgtcccccagctgccgaggcttcgctctcgccccccgccctgaggcagcacaccaagtggtcacccaccagtctccccaccacaaaagactcccctcccctttgctccgctgccacactgaggccacatgaaccttcgtgggaagagaagaccccgtcactcctctgctcgaagctctgcggtgaccccatcacacttagaggaagactcaaggggcagccccttcagggcccgtgcatgtgctgttctcccctccccgggagccctgccctctccctgctcttgcatctctcccagggcgcagccacccaaagtgaggcctccctaagcataccatctaagagggcaccgctcacacacccccatttgccacatgctcattcagcttcatttttctctcttcacttgtcactatccgcccagatacacacatggagatgtcatgacatctaacacactctgcttgcccctacaagcaaataggctccacgaagccagggactttgttctctgtacctctgtgtcagcagagtctagaatattgcttggcacagagcactcatagtggtaggcagagagtgtcagcagtgctgggtccagagtactaagagtgctaggcttacaaagtactaacagtgctaggcatatggtaccagcagtactagccctagagtattgcgagtgctaggaatacagtactaacatgctagggttagagtactaagagtgctaggcttagagtactgagagtgctagacttagagtactaacagtgctaggcctagagtatcaacagtactaggctgagagtgctgagtgctaggctgagagtactaaacagtgctaagctgagagtactgagggtgctaggcttagagaactgagggtgctaggcttagaggatcaacagtgctaggcttaaagtgctaagagtactaggctgagagtatgaagagtgctaggctgagagtactgagtgctaggctgagagtactgagtgctaggtttagagtactgagggtgctaggcttagagtactgaggatgctaggctgagagtactaatagtgctaggctagagtactgagggtgctaagcttagagtactaagagtactaggcttagagtactaagagtgctaagcttagagcactaacagtgctaggcttagtagtaacagtaataggcatcacagtaccagtgatgactaagcactttagtgtatgcacttcagaaaatagtcaaagagttaatattcaaataggttaatatatttcaacactttaaatctattgcttcctttaatctccatccaccaaggaggacagcaatattatccccattttatggatggtgaaactgaggcacaggaaagttaagcaacctgtagatatttatcaaatgtgttgaaggaacgaggaagagaacaggctctccatcacagaagtgtttaaactacttgttagggttactctcggatatgcaggttcctgagagccgctagcctgtctcaactcagatgcaagttctacaatttagaaatctttggaccccaggactcttcctagccacagcctggtgctaactctagacatggggacacaggtccagtgttggtggcctgccaccgactgggtttggcaccatcacccagaagccgccctcctctgggtttcccaggcgccccaggtggctgggctgtgtctcgggtgatggaggaggtgtacagatcccatgtcagggtgtgactgcccggaggcagtggcggcagaatgtcaggtgccaccagggactccaggccttcctccgcggcgcgtacgtgcatcacgtggtgtaacatgactgggcggctcagtgtggcccccaccctcacgtgccctcctggcacccagcctccgcccgaccctctgagagctctgaggagtgtgaacaatgggacgggctcaggctcactcacccgggaaggacgctctgctggctcagcaggaaggggcctggcacccaaagcctggacatcctgtgtggcctggagggagaatcagatggggtggccaccgcaggagactgggtccctctcctccactccctggcagtgactctacactcaggacccacgagactgctaatggtaaccacagggacagccctgcaggggccttgctctggcccactgtgaaagggaaagtccccttcctccactgatgtaacaaaacaaatctgctcttgttggccctgatgagctgacacccggccagagccaagcccagggatgggaggtgcccactggcctgacctcggacaccagctcctgggctgcaggtccaggaggcacccaggcacaatcaggctcctgttgccaaaaaagggagtgcatgcagagtaagcaaaatgagtgtgccccataaccacattcagtcacccggggccacgctgtgctgagggagggtgtggaacacaccacaatcctctccagcctccatctctgtctttcctgggagaggttctgaggcctcgtggagatttacacaaagcctgatgcttcagaggggaaaatgctctggccatgcaaattcattccgttttccatcactcattttgggtgcaggatattttcagcactttcccagcatgcaaagcaaagacaggattgtcatggagagccctgtgtgcttggaacgtgccaagagcagaggggcgtgagctggtttggggcattctctctgcttccctacaaatgcccagtggatggcccttcctcggagctgaagcagttcccatttctcctgtatggcactgtcaaatcgaggcagagggacgggaaatggtgaacagagaaggaagactcaagggcaaaactcccggaaggacagggggtcatggaagaaggaattctgagcctgacatcttagaaaatggatatgcagtttgcagatctacatccctcacactgtcttctgggaatggcgagaattgtggactttgtttccttttgctctgatatctttccccccacccaaagcagacccttttgtttaattctgatgctgtaggacgcaccccggcttgcaagccaggctgtgaatcagcggtttttgaaaaggatatggtaccacagctcacacatgtatgtaatgcagtattttctttttttacttttttagtatggaaaaatttaaacacatatgtaaaagtagacagaacagaataatgaactccattttttctagcatgccatttcaacaactattaactcatgaggatggtgtttttgcttttttaattttttttttttttttgagacaaagtctcgctctgttgcccaggccggagtgcagtggtgcgaacacagctcactacaacctcaggaggctcaagtgaccctcctgcctcagcttcctgagtagctgggattacaggtgcaggccaccacacccagttaatttttaaatgtttcatagagaaggggtctatgttgcccaggctggccttgaacttctggcctgaagtgatcttcctacctcggcctcccaaagtgccaggattacaggcatgagccactgcacctgacccccagtgtttaaatgtagctaccatgacgtatgcatcaaaatcacctacaagtcttatgaaaaatgcaaatttcctggatctcaccccagatcaaatatatcacaatttgggggttcaagtccaagaaccggcacatacccccaaaggattctcacagacagtcaagtgtggggggtcactggtagcggttagataactcgggctggggtcccagccctgccacttactagctaggtagctgaacaggtgatctccattggagtacgggctttacggggttgtcatggggaataaacaagatctcacaagaagagcacctagcacagagtcagcgctcattaaacatcctatgcagttactcaccggcctaacttacgtttgacttctaagccttgaggaaaatgtgtgccaaggtatgggggaggcggcagggcttccgagagagccgtcctcccatcccagccctgccatcctcccacacgcacgctgccgtcctcccatccgcgccccgccgtgcctaggtggagaggcggcagggcttcccggagagccgtcctcccatccgcgacccgccgtcctcccatccacatgccgccatcctcccatccacgcaccacgtcctcccatccacaccctgccacctctccctggtggccttgcccttcgtgtatctgttcagggccattggtgaacagagaaaaaaactactctagtaaaaagcaagtttcctttcattataaagaaaagtgaaataaattgttaaacatctacttctaaattaagaataagtgggccgggcgcagtagctcatgtctgtaatcccagcactttgggaggctcgggcaagtggatcacctgaggttgggaggttgagaccagcctggacaacatggcgaaacctcatctctactaaaaatacaaaaatcagccaggtgtgatggcacacacctgtaatcccagctactcgggaggctgaggcaggagaatcgcttgaacccaggaggtggaggttgcagtgagccaagatcgtgccactgcactccagcctgggcaacagagcgagactccatctcaaaaaaataataaataagaaaaaataaataagaatatgtgatgttaaattctacccaattaaaagcaatttttttttttttttgagatggagtttcgctcttgttgcccaggctggagtgcactggtgtgatcccgactcactgcaacctccgcctcctaggttcaagtgattctcctgcctcagcctccaaagtagctgggattacaggtgcgtgccaccatgcccaactaacttttgtatttttagtagagacggggtttcgccgtgttggccaggctggtctcgaactcctaacctcaggtgagccacccacttcagcctcccaaagtgctgggattaccggcatgagccactgcacctggcctaaaagcaaaaaaaaaaaaaaaaaaaaaaaaaattattattattttttttgagacagagttcctgtctgttgcccaggctggagtgcagtggcacaatctcagctcactgcaacctccacttccaattctcctgtctcagcaattctcctgtctcagcctcccaagttgctgggactacaggcacacactaccatgcccagctaatttttttgtatttttagtagagacggggtttcaccatattggtcaggctggtctcgaactcctgaccttgggtaatccacctgcctcggcctcccaaagtgctgcgattacaagcgtgagccaccgtgcctggccaaaagcaaattttttaaaaattccaatttgagttgtgatctagaaagggaggatggagtggaagaagagaaagatagggggaaggctgaagaattaaagatcatgccagggaggcagcgaacaggaaagccaagaccacagaaaacaggtgctcaaggcgaaaggcaaaggcaggagagagggcggggcggggcaaggagccttggtgcgggactccactctcctcgctcacagggcggcggtcccatctcacggcatcttaggcttccaggaaggattttcgagaggcacttttatatatttatagatgaaatgatatgtcttggatttgcttcaaaataatccaaggggcaggggaggtgggtgtgtgcagggatggagctcgattgcccttgagtttgtagtctggggttgagcagaggacacacagggcttcagtacgctcttttctctttgataagtgctggagatttgcctaatacaagtttaagaagtttaaacatttacaactatacacaaatcaggaagttcacaggctgatgtcagccccatgggtcagatgtggtgctgaacctgaggtgcccttggcctttaagaaaaccggagattagaggaggccgagtgtgaaagtgttgattatgacatgtcaggcaaatgtttgccaagtgaatggatagagacctccatcgggtgaaaatgctttgtgttcaagccccctttgtgaccctgggcacctgttagagaagcaggggctgggcaggggtccgtatgtggactcccaacagagcaagcccaccttgtccaggcagggcttggatccacaagtcctggcctcaccactccaggctcaaagggcagccagccagctacatacttgttcccatgcttgacacgcacagaaccccgcccagccttgcacttaacaggtgcataataatcccttaggaaggagggtatgggacactgttgccccattctgtagaggtggaaactgaggcttagacataatcaacctaagaatgggacttcatataaactcattctgcaaagaacggggaccagtgaaattagcagtcagtgttttgaattcctgaaaggaaacagcgtctgaaacacagagccctgcagaaagcacgtaggcctgagccacgcagctgctccagcccccaagcccgcgtggagcagagatgggtacacaccccgcaccttcagcttccagagcgttttagggaaatgagtgttggcaggaaggggagcagtggcgacttgccccacaaaaattcgaggcaacaaaagagggaaagaggtgggccgggtgtggtggctcacgcctgtaatcccagcactttgggaggccaaggtgggtggatcacttgaggtcaggagttcgagaccagcctggccaacatggcaaaaccctgtctctactaaaagtataaaaattagtcgagttgggtgacgcatgcctgtaatcccagctactcggaaggttgaggcaggagaattgcttaagcccgggaggtggaggttgcagtgagctgagatcgtgacattgcattccagcctgggcaacagaccgagaccccatgtcaaaaagaaaaaaaaaaaaaaagaaggaaagaggttgccttcataaagctgtaaaatcgcataaaaagagggtgcaatcagtcattgacgagagttacccaagagactgtaattacatggttaaagaatttggaaacacctagaactccactcaaggtgactggggtcatttgcagggaggcaagaataatatttgacttgaatttcatatgcaggaactttctggagaaacgccaggtgaagagaatggcagaagggtggtgtcccaaggaaagggcagaaaacaggtggctccagatgccttttaagagaagggctgccccggccccagactcaccggctggtacagtgaccactcagcagctctggactggctcccgtgtggccctgccaacaggatggggagggcctggcatgtgtgagtagccatgcccacccacgtatttgcctactatgcctgccaactgggatgaaaaagctttggatctggctaagtttctgtgaaccaggtaataaatctgttcttggtgtgctgaaaatagtggggtttttcagcctataaagttgatgagccaccctgagccttggggacccaccaggaaagcatctcctcatgagaaaggagctggccttgaccttgctggggacctgcctcaaattcactatccctgcatgggtaggtgcttgtcattctttctgcccacgcagcatctttttacacctcctctatgcctgaccttgggagtggggggaaggggctctgatgtgagggtcgtcctgggccagactcagcttctgctacatggaagcagatgccaggcaggaggtcctgccttccagagcagacactatcttagtcatcttgggctggcagaacagagcacatagatggggtggcttacgtaacagaagttgattttcttacggttctgggggctggaaagcccaaggtcacggtgccagccctgttggtttctggtgaggaccctcttcctggcttgcagacagccgccttcccatggtggtgggtggaggggggggtagagctcttcctcttcttgtaaggccacagtcctatcagcttacagccccacccttatgactttatttacccttaattacctcctcaaagccctatctccaaataagccacatcgagggtcagggcttcaacgtatgaattcgggggacacgatctggtccacagcacggcacgagtcctccagctgcatgcaggtcatggtggctgtgcccagtgccacgtgggcctccgtgtccccgctctgtaagtcatggtgggctcctctcggaaacccaccaaagtccccagtaaaagtgctgagtagctcatgaagtccccaggatgcaaaaaaaaaaaaaaaaacccaaaaacaaaacaaacaaaaaaacccaggttttttttgcatcctggggactctgtgagctattcactgcttttaatacatttttgggatccactacaaccagccagaatgaatctctgggcccgtagctgactggagggaccccttccatggagtccaaagatgacggctcaatgggattctctcattcttgtccaccaaaccagaaggcaggtctgcccacctcccctggcccttctgttcaagaactggcttcatctctcttcagcatcggcctctgagacctaaagggctgcctgtttccctgtgttcctgagggtgccagcctgcatcttgccaagtagtttcttagactcagatgattcctgttctctctgtgctcagactttccaacccacccacaaacattcattaagcccctgataagtacaaggccccgaactcagggaaatggaggggactgaaggagacgtgtgccaccctgttccccgagcgttgctccgggagacgagatgtatcttgcaaccagctcagcggtggaagcagtggaagtgcagacagaaagccccatggcagaagggagagaggtcctgccccactcccggtctctgcaacatgcttcccggccccggcacgctcagccctggtccaacttatcatacaagttcttgggcaagtgggactttatgaaggaggtagtcacagagacccaccgctcaggcctcctgctgggggagctgggctataacttccgcttcccccttcacacagagaccatgctcccaacccaccccaaacccgccagcaccctcagcccctgccctgggctgctcccagccaatgcctaagcgccgggtgctgggtcaccctgagactctcgctgtccaatcttccctgccaccgtggccgcaggggtcagaaagaagatgccccctgtcttctgcctcctaccctcatccttcccgggcagttcccccagtgagtctggtgtgtgttgagtcctgtcctggcacctgcctctcaagggacctgcattcctgcctgggtcccgcccacagcaccactgtcttgcgatgggcactgtcactcccacctggcttcccagagcctatgtgggcctggcaccctgatctgttctcaacaagaaactggagcctgcccctcctccccctgagtttgccaggcagcctgtaagttggggctccaagtaacgccttccctggcccctgtgcctactgaggtagttctgttatttcactgaggccgccacattcaatctgcaccttcccatggaactctcccaattggctgtgcttgctctgcccaggtccagaccaggggcagctctggcccagtcctgggctcctccaggtctgtgagcacccccaggggatgtgcttaggtcagggtgaggcctggccactagcactggcccaggggcgagcccttccaagatggtccaatcagaatcagggaagggccctcattccacagtagggggaaatgccctttcttctttctctccctccagatcataaacctacaaactcctccagtggctgcagacagccgtttgtgaccacaaggaaaggtagtggaagcccagatggacacagagagaaagaacacagacttgctggtctgggacaagcattgttgttcaagccagttcgcgtttgagtttctgttacttccagccccaaaagcaccctagataggagagtctacctaatacagcaagaccatggccctttccagaaagggtggaggctgctagctcaggaggtcggtctataggcaattaaatctctgtgggtgtaacacagactgtgttcttactgctatttgtggaaaacaattttcttaaaatagatagaacagaccttgacaccctgaagtcaagcactgacagcctctgttttgaaaacaaagcaccgtcaagctctagaaaatgcatgcagggctccagagcccgtccagatgagcagaaatggcagagggggacagagggggatgaaggaggagagaatggaggggatggagggggatggaggggatggatggggacagagggggataaaggaggacagagagaatggaggggatggagggggatgaagggggcagagggatggaaagggatggagggggacaggggattgaggggagagagggcaatggagggtttggaggggatagaggggacagaagggcatggaggagaatggaacgggagggagagggtcagaggggatggttggggacagagggtagtggtggggggaatggagggggatggagagggatggagcggggtaataagggcagaaggaacagaaggagatggagcaggcagaggggatggagggaatggaggagaatgaagaacagaggggggtgaaaaaggacagaccagggtggaggggcatgaagggggcagaggggatggaggggacacagagggcagagggggacagaaggatagaggatgtcagagggctggatggggcagcctggccacctacccaggcatgggagccagaaccctgcagccgcccagcactcaggcttttctggggtcccatccctgcagccacccatcctgcatcctgaagcgggggtcctgtcccctctctgcatctcgaaaatgccccttcctgcttcctctgccatctcctcggtcactctggagctgccttctgcctacaactggagctctaatgccaacaggaaagggctgaagacagggccagggccagggccggggccagggccggggccgaggccagcacagcgctatggggcccagctggggtgcctgagggcctggctccccagagcacgtcctccctccaaggcctctcatgcagaaccgagggtgaccagccacctcccacaggaggcgtgccacccctctgccccatggtcacctaatgtccccctccaggcctgcccgtgacagtgggggacatatgctaggaccccctggggcagtcaaggacattctaccctgttggccagggagcagcagggtaggcccctctaaaatctgagtagagatttagtttgtctggagaagacagatgttttggcctcggatattcacagtgtcaggccaacgtcccatcaagcatgtaccagccaattatgtttgctttcatagacgttatctggccttaccattcctctctgacccaggtcccttagttcccatggtgactctgtacaaacactacacatactccttgtcctagattctttccccttatctgcctatcccaaccctgctactccctcgaggcccagttcaaggccacctcctccatgcagcccaccctgactactccttcccacacaatcaccttgcagaattcctcaagcgtggctgtggcattctgtcttgtgggtgagctggctattgtttcctgcatgtgaatatgatggatgttgtagaatcctcctggcatagctcctagtgcccacagcacagtgagcctgtaacccgtatttctcattagttggctctctcatttacccccagagacattctttacaatgcaggtgtagactcagatgtgaccaagactttgctatcttataaaaggggttcagcccattgcagtctggttttcctagcacccttcctcctgacgagctatgttcaggggagcgttagttcgttacctgcttgacatggcactgcctgccaacctcaccttaggaaaagggtaaataagtttacaaacattaggatgggtgaaagcagccatctttcagccaaggatgtcttgccattggcatcctttcctctcctactcttggcatcaaaacttccagcgaaaggactaccatcacttaccccagctccctccccaggggtctcctcgtggagctcatctctcactgaggaaagaagggctcggctttgataaaggaatgctagactttagcaggtgagtggcgggggtaggatcctgtctattctccagaaatgccatgagactcccgtggggacacacggacatgcagccccatgctctgcgaggttcgtgtgcaagggaagccgagagtgtgcaccgccgcctccccaccatcagccaacagctcaacaccgattcccagtcccggctgtcacaggcacttcttattatggatgtgctactaacacacagcaaaactgattagataggcacaggcccggcaggtccccattaaaggacattcttccctgccccagaggccttttaatcctccagctgctccccatttctgagcaccccagccccacaaccacatccttggctcctcttttcttaggtctctgcctcccaaaaagtggaaaacggaaggctgcagacaggaaagacatcccctgcagcctgcccactcctcccctccaccgcaggagaactggagaaattctatgctagtcaccatctctttctgtgtccacagccccggctctgagaggtggaccacagtgacgttgtgcatctcctgggctgaatgtcagtttagaatcagtgttctgtcacctccaataccctttccctaatgcccagttgccctggtaaaagccataagtccctttggggaagaacgggagagaggttaatagtatacatttttggtagtgcagtggagtccttcttcaaggggacccagcctccccctccactcaaagagttctgggtctggaaactggctcaagcctaagaattgattgaaggaccatgacgcattcgagctagacttttgttcacttggcctacacttctacttatacagatcgagttagaatgtagtaggcttcccatccatttcacttctaagaacatggtggcgaactggcccacgccctaggtcacgcggcccaccccaaggagttgagtctgacggtcctgatggctgcttggcctctgctttcgccgatgggccgcacctgccttgcctttggtgattgtttccacttggcccctgccatgctgggacccagatactcccacttcatttaggatccctggtcagtggcagtaggtccccctgtgatttccaacctacagggagctcttcaagggcgctgggctccctcaccacagtcttggtgaaaggtgtgtgagtggcaggtgagttggtctcaactggcaaatcctctccagtctccctgagccatgatgcctccctctgcagcagacgcaggcgtttctggtgtttcaactccgttcagcatgggccacctttgggtccatgtttcagccaacccgcccgtgaagcctgaagcagctccatcttgggagcaaatcctccacctcggcttctgatcaaccccggttccagctgatctactgttctgtgtaagagcaagtacttgtcataaatcctgcccttacggcaaatcaaccttgataaactccacggtaaatcctgcccttaggcatattcctacaccttccctctggagcaccatacctttgccctatgtatagaagccctgggtccggggggtgctggtggggacctacctgtcttgtggttgcccaagactacacttctgcccgtaagttcccccaataaaatcaccctataacaacacactggatttgtctgtcttgttctttggtttctgggctctttctgcatttgggggtcgctttgcatacagggccctttcacagacacagccagacagactgcagggctcttccagctcccagcccctttgtcatcctctcagcaagcccagggatgggcatctccacagagtctgtcggccctgctgtccctcagaggttgcacctgctcccgtcctcccctcctgaggaagggggtgactggtgacttcccaaggcagggaggttcccacaggccatgctgctcagagcccgaggatgggaacttctgcgcgggcccttggagggtagagctggtgctggctcacttgtctccaggtcccgtcgtcgccctcccaggcgctccctcccggcacttcccgggctttgggcacccttgcttccctcttttcaaaggaccctgtgctctcggaccctgcgcaggattccagagcttgcacactccctagccggagcagccgcttgcccgccccacaagtgcggctctccgcgccacgctccctcctgctagggctccaagtgccgacttgcagaggcctcgggagtgacagtggaacagagggtggcaccggcaccagaaagcaccccccgagcctagatttctaccttcagaaactccgacagtggggacccggggcgtggcggggctgctcagtgcgtcccagctcctcctcggtgcccaaggaggctgccactgtggccgtgagtccaggagaggcctcccaaccctggcctgtggatgcatcgacccctttcaccgcgcctgacgtgagtactcctgccccttcacgggccaacaggagcgaggtcggccctgcctcaaagggcctgtgatccccctaccgtgtgatgatacaaagagcaggcgagaagcaacccacgtgtccatcgacgcatgaacaaaatggggtccacatgcacagcagaatattactcagccttaaaaaagagggggatcctgccacccgccacccacacacacgaaggacatctgtgtggacatgatgcttgagggaaacaggccagtcacaaacaaatactgtctgattccgctgacgagaggtccctggagtcatcaatgcatagagacaggaagtagaagggtggcctccaggggctggggaggagcatggggagtcagggttgatgggccagagtttaagtgcttcaggatgaaaagggttccggagatggatggctggctgcacagccacgtgcgtgtacttaatgctactgagctgtacacctaaagatgggtacattggtaaattttatgttatgcatatttaccgcagtgaagaaaaaaaaaaaaagagccaggctgggtgtggtggcactttaccattccacagaagagctaatatcaagaaaccaaataaaacctaggcaaaaatacaattatttataatttgtattcaattatatacagacagttcataccagacaggagaagacagataagacttgaagtgtggggaagacctcagcacccggggcccccagggctgcacaggggctggtctgcaccctgcctgtgccctttctgccactggtgggagaagaaagaggccgagaggagctatgtcactgcacctcgaaatcccggtggctgagcaggttgggccctcccccactttgattttctttgatttttctatcctagggatgaaggtgatctatttttagtgtagaggctggtataaggagttgctatagcgacagctggtggttacaaaccaggtcctgctacagttcccagtcatgaataaatcccaaggctgagcccgaggaagcaggcagcctcagagatggtgctccctctccacaggggtcccacctgctatcttcatggtgtgtccttcacaggcagcatctaagtcctgctagtggggaagcagctcaggacatggggcgctggggactgcccatcagaggaaccgagggcttcagcagaaatgcatgctgagcctcaactaccaggtgaggcaaagcacctgcgtgtgcgcagagccggatggtggcagaagagagctggcatgcagggcgccaggttaggaagcctggggaagtgaagacacagcacctgcttacagaatcaccagggaggcaggacacacacacacacacacacacacacacacgcacacacacacagagctgatgccacattatttactatggctgcgtgcgtaccctactaccagtaatcttagtacgagtccaacagaaaggcacaccaacgcacaagagtgcccatgagagcactctgtcacagccccgactggaaaccacggtgtccattaacaactggacggacgcaggagtcgttgtctgggcagacagcggagggttctgcagcaatgaaatggagttgatgaacttcaacgccgcacgcaggcacggctgcatctcacaaagtgcaagtgaaagaagccagaccaaaaaaaaatcgtgtaaattcaaaaccagacgatgccaatcttgaggggaagtagctgggagagagtatggggagcttctggggtgctggctacacaagggtgttcagtttgtgcaaattcgtcatctatgatctgtgctcttctccatatgcttacactttagcaaactttgccttaaacatttttagaagttagcacagcattgttagtcaagtatcaaaaaggtgatactggctgggcgcggtggctcacacctgtaatcccagcgctttgggaggccaaggcgggcggatcacctgaggtcaggaattcaagaccagtctgaccaacatagtgaaaccccgcctctactaaaaatacaaaattagctgggcatggtggtatgcgcctgtaatcccacctactcaggaagctgaggtaggagaatctcttgaacccagcaggcggaggttacagtgagccaagattgcgtcattgcactccagcctgggcaacgagagcaaaactcagtctcaaaaaaaaaaacaaaaaacaaaacaaaaccgatactcaatggtatttggtgttggtgggctttgaggcagacctgcctgtgggggactgggacctccaggaggaggcagggccctacgcccctccaggctgtaatgagtgcaggggcagaggcatccagccatcgaggtggggaggaccccaggtgagccaccagcagccacgggagccccgtggggaggaaggcaggctggggcagcaggagaccagagctggggtgcccctgggcagggactctggaagggctaggaaactgaggctgatcaccctgcaggctggcgcacgggtgcctgcctggagacgcaggggtttgctccttttttctgtgctgccaactggacatccctcctcagggtcactggccacagctgctcagaggtcactccagactgcagccactccctttccatcagccttagctgttctgtgatcaaaacagggctggccaggcccaggagcgagaaggagggagggagggagggaggaggggccttcaggccctgtatcccctgggaggcgcagggcagccgggtcagcgttcaggtgctgttcattgatgaactcactagcattagctgatgtgtcatctcttccagccaaaagtggggcccagccaagcatcttagtgatgtgagtcatcaaaacttcctcctgggtctgctttgagccccaccttcctcctcctgcagtcatgctcttagcctcagggccctggggcggacgcccggacactcccccagcagcctgctttccagaggccactgcgctgctcagctccgggggcccgtcctccgtggatccctccaggcccagcagagtgtttgaccacgggcctgaccgggaggggagacgccacctcctggggacttgcaccccaaccagcaccactgtcatgagacacccggaggccagcagtccccagggccccaagaacacacagcagcaccagagactgccttggccctcagggaacgttcatgttgatttacgctgagagcacctggactttgcctatttttttcttctcaatcgctaaaagacaaattattaccgcagggcagaattcatcttgctctctgaatgtaccaagtgctcactctcatctggaaattggaaccccgggtgaccatccttgggtgccaaggctccctggacccacgcacaagccctgagtgaggtcctgtctcacaggatgggggtgacagagcagcaggggctggccagcacccagccaggctgcggccccaaccccaggtcaccaagctgtggtggcttctctgtcaccgtccagagtcactattttaaaaatacacccccttttgaatctcctttctccctgcttcattatttaccccttcaggctctgaaatctttccctttcgtcttcggacactttcagacgctgcagtcctggaattgtttgtccagtgttcagcttctctgctgggaacccgggctctccagagggcggctgctcccagagccacgccactgtcacgacagctcacctctcacagccctgatgagcgcccctgggagagcacgcacctcgctgacaccccaccagcgcccagccccgtccacaggcgatgctcacctgttcctggggatttagtcttcctgacttagagcagcagctctgggtgactgggatggggtcagaaaagggaaaggggcacttgaccgtgacatccaaggacacgcaccagagctgctttgctaccctgccaccctgtgaggtgacagccgcctggcctgctgagtgactccgggagtcctcggggagcagcacctctgggagagctgggccacttgtccagggttccaccaggcagcgcttggtgacagtgacgtagggagaacaggcagatgggttatgagcttttccaggcatggatgagagtggggcggacagggggtggcgggcgggcctcaccaaatccacggctgggagtggagagttctcaaattgtgtgaacactgtcccatcatcccaaatgcttctactcactggctacagtgtccgaaaccccccaaagacccatcctcacaaacaaggatgccgcacccctaggagtcttctgtttggacacatccagcagaacaatgggcaccagggctggacggttttgggtgggaactggcaaaaggagaggtgggtgggggccggggagggccttggagccagaggggttgggggagggacagcctcagccccagctgtctggcacataataggctcttaatagtgggctcagccccagctctgtccgcactccacttgggcaggccagtccttagcccatcggtgctcaagacccccgagggccttcatctcaagcaggtgtgatccagagccctcccacggtccacaagaggggcatacactggctgctgtgcccagcctcagcctcatctcctacctgccagagaccggctcctgtggctctgcctgctgccgtccagccccgcaggcctctcggagtccctagaacacaccgcaggctcccttctggggcctggcctctccagctctcggaagggtctgagcacaggcatccacacagccctctccccatcacccactgaaccgacccctcgccctgcctccacggcatcaccaccacctgacctggtgatgaaaatacgtttgccatcgaaacaaggcagacgcaaaaggacaaacactacgtgattctatttctaggaggtccctggagttatcacattcgtagaaagtagaatggtgtttgccaggggctggggtcaggggagtggggagttagggcttagaagagacagtttcagctgtgagtgatggaggacatggcaggtggtaatgcctacacaataatgggaatgcatacgtgaaatggtgaagatggtaaatttgtattatgtacatctgaccacaattaaaatcccctcattcatctacccactctcaccaggccgtgtggccccgagggtgcatgcatctctcactcactgctgtccctagtgtgggaacagaggccagcacaaagaccctgaggatgcaggtgagaatgacagaacctgtcattgttaaccctggaagacagatgctgttatactgttctccctacttctgtattctttcgaaaatttctggccaggtgtggtggctcacatctgtcatcctagcactttgggaagccaacgtggaggatcgcttgagcccaggagttcgagaccaccctgggcaacatagggaaaccccgtctctttttaaaaacaaatttaaaaagtaaaataaaaagaaaatttctattggaaaaaggcaaacatatatattgggaaatttcagggcaaaaccaatagtgataccagcagccaggccagcagatgggcgccagaggcagtgtgaggactatgaggggtgaggaggagcaggggggctggatgggggcgggagagaccacaggcttgacttctcagccctatccctctgctgaagtgaagagcacaagatggtccccacagggccatactcagccaagggcaggagagccatggcacgcagtattggggtgacctgaatgttcatgggccaggaaggatgctggcgttctgggcaagaagccgttgcgtagtcatgcggtgtgggctcatggaaggggaggtgggtataagggccaagcgtcctcagaggatgtggtctccggtcttactgggaccctgggcacacaaggatgaaacaccagcttcctgacacaccgcttggactcctggctccagtgctggcctcagaaatgagcccttaagacgctaaatggtttttatttaattactgccctgtaattgcagagggtgaaagcgctactacagtcattgctctttgatctgattagcataatcctttcctaatcttccctctacatttttattattgttgccacataccctttgtcgacataatctggatttctctttgccaaagaggccgaaagaaaggcttagccaagctcgtcacttgtctagcgcctggagcctgaaagctggagaggtggggagcttcccttctgtgccagacatggcctccctgcctggctctgcagccagagaggggtaagggctgagcactcctgagtcagagcttccagggggctctgtcacaaggccagcgggtgaacatttccagcgacagccacaggctttccagtggaaatgccatccaccgcaattacgaatggacctggtgattccgggggctgcagggccttgatttgatggctgtggggagagctctgtgtgtgtgtgtgcgcacaggtacatgacatgtgtgtgcgagtgtgtatctcttgacccggggaactgcagggaagcccccagataaacagtgtgcaccttgtccctggggaagcagctccatgctgagttaaggcagaggagcccgtggttcctggaaaagactgacacagccacagaggaaacccagtggatgggagggacctgtgccaacagcctaggtgggcttcctgtggagaggagggaggagaagtcaatgacagggatttcatgaccctcacagaagctttctcagggagaagaggcctcatctaagatttttgtttgtcttttgagacagtgtctcactctgtctcccaggctggagtgcagtggtataatcttggctcacttcaacctctgccttgtgggctcaagtgatcctcccaccttagcctccccagtagctgggactacaggtgcacacaaccacacccaactaactattttttgtagagaaggagttttgccatgttgcccaagttggtctcaaactcctgggctcaagcactcctctacctgcctcaacctaccaaagtgttggatcacaggcatgagccacagcacctggcttttttttttttttttttttttgagacagggtctagttctgtcacccaggcgggagtgcagtggcatgatcacggctcattgcagccttgacctccccaggcttaagcaatcctcccaactcagccttccaattagctgggactaccgacatgcaccaccacgcctggctaattgttgtatttttcatagagatggggttttaccacattgtccaggctggtcccaaactcctggactcaaacgagccacgtacctccgcctcccaaagtgctgggatgacaggcatgagccaccgaacccagccctgagattctatctccgggaataactgtatgaaggagagggcgttgctgagagggaatttaaaacacaaaaccctgaagcaatccttcttggagaacagggagcaaccctgggctggaacgttttccagctatcgcagagccagcggtttttatggagaacctgcgatgctgcaagacctagggttagagctacagaccgtgctcctgagatatcgcccctgttcacaagcagccagatcacagaaaaggcacccagagtggtttttctttgagacggagtctcactgttgtcacccaggctagagtgcaatggcataatcttggctcactgcaacctcctcctcccgggtttcagcaattctcctgtctcagcctcccgagcagctgggattacaggcacctgctaacacccccggccaatttttgcatttttagtagagacaaggtttcatcatgttgaccaggctggtctcaaactcctgacctcaggtgatccacctgcctcagcctcctgaagtgctgggattacaggtgtgagccaccgtgccaggccctcagggtggttttctagacagtgatcgttcagctgggtcttgagaaatgggtaaggtttagacaggcacaggcttgggagggagggcttggtcaacactcttggactgtttttcctcactcagtgtatccacgcccaacactgtctgtggggcacagggctcccgcctcccacccagcctagctcttggctcttctcactgacacactaaccaaagtcagacatactatcaacccaggtccctgggctccagcccactaagaggagccttagcctgagcaggggctatggcctcttgctgtttcccaaattccagaggaaggctctggagggacctccgattttcttgaccctgtggtcagagcttgcatctgcatccaggctcttacaaaacttggttgagatgtaaacattgtttttgatgtcagaagcgtaggagacaggatgacagccaaccgttaaacacaaggcgggaagccactgtctggcacataataggctcttaataatgggcctgtccatccccattagcaaaaccagatttttagttaataataggttctggtttaattctacagtagataagtgtttattactttattacttaaataaaagtcatctttttagaccgtgttagtgagtctcccgtctaggattccatccctcctctccctgctcagggctgggtgtcctattcccgtgcacagtcaccatttttttttttttgagggtcttgcgctgactcccagcctggagtacagtgatgtgatcagagatcactgcagcctcccctcccaggctcaagcgatcttcccacttcagctttctgagtagctgggaccatgggtgtgcaccaccatgcctggctaattttttatttttttgtagagaggggtctcatgatgttgcccaggctggtctcgaactcctaggctcaagcagtcctcccacctcaacctcccaaagtgctgggaatgcaggcttgagccaccgcacctggcctacattcacctacaagtgatcccccaaccttagcctcctgagtagctggaactctactcgattagacgccgctctctagttctctttatggggctttcttcttcacaagattgaacactctctgggttcaaggactgctgtctccttcacctgctctcccccgaggactcagcacaatctgagcctgcagacgcttccaggagagctgcccaaagcggatatagcaagaaatacaggcagattttagatttacctttttctttttctgctcttccagttttcatttacagttcagacattttgccaaagtcacctccctgttacacataatgacaatatttttccacttaacacatcacattccggtcaggggacatggcttcatacaccccccaggctcctcattttactcatcccctaggctgtgtctccccagccctggtgaaactcagctgataaataacagcactggggtaggggtcctgctgttccatcttgcagtgggctcttcaggaataacctatgccatgcaagcagtaacgctggcaatgcgctgactctgatttgtttttttagatagggtctagctttgtcacccaggctggagtgtagtggcccaatcacaactaactgtagcctcgacctcctgggctcaagggagcctcccatctcagcctcctgagtagctgggactacaggcatgtgccaccatgctcggctaacttttaaatttttttgtagagagaaggtctcattatgttgcccaggcttgtctcaaactcctgggttcaagtgatccttcctccttggcctcccaaagtcctgggattataggcccagcctaaatctgattcttttttttttttttttttttttttgaggcagagtcttgctctgtcgcccaggctgaagtgcagtggtgtgacctgggctcactgcaacctctgcctcctgggttcaagcgattctcctgtcttagcctcccgagtagctgggactatatgcgcacgccaccacgcccagctaattttttgtatttttagtagagacagggtttcaccatgttggccaggctggtctcgaactcctgacctcaggtgatccgcctgttttggtctcccaaagtgctgggattacaggcatgagccaccgcgcccggcctctgattcttaataaatgaaatctgacatctaattttgagtgggcaggtcttaaccaggtgtggagctaagaaagctttggaatcgacctgtgtggctgcagacagacaagggcaaaacccactccaagtctgcaggtccttgaaaatactgaaccacagatgcttcaccacctgttccacttgccctgaccccatcctcctgtacatggaggagctgcagaagttgccagagaccagggagaccacaatgcaagcttctcctcatggggcacaaattaggcaggtgtttcccctcccacattagcccacgatctgtcagattactccgctacggaacctgggaagaagacctctctcttcctgacctccaatagtttcctctaaactgcatgtttcatttttaacagctgaaaacaacagtgcccatccactcttacttttcccctgagccacagtttttgcataaatgaatgacaatccaatccatcactagcctccctgggccaggtggggcaagaaaggaaacagcttcagaaagagtattgtcaggcggctccccacagcagcactgccatcagcaaggaaacacttcccacgtattcctctaaccaccgcctgatgttatatcccagttggaagagagtggctggaaacagctactgcttaggagggtgtgcacacacgccgtggggttccctcccaaggacagaccaccaggggctcgggaatgggcagagtcctaccgaaaaggccatgaggctccgactggcgcctctccgtgcttcgattttggtccttgtgtttcttgttgctcctgaggctcccaaagcgcttcatgggtagctgtggccacaggagtggcgacaggtgaacatatcaggacccacagaaccggtgtcagccccaggtggccgggagccagaggagcatcagcccgacaggcacagggcgccccaaaagctcagagtggcagcctgtgctcaggtgacagcccgggttcaagcgtcctcaccagggggtcttcagggcgacctcaccgcagccccagagtctgtgaggcgccagggagtggagccgtcctgacggggctgcacctccggccacagcagctggagcgtcagcccggctgtccttaagtagcaagaagctgccggaagcgcaaacagaacttcgcaggggatttgttgatgtagttaaggtcagctgctcactgatactctccagggctttttttttttttttttttctccttaaaattaaaaaaaggagggaagaccagataggcaaaggaggcacaagcctgcaagtcatgtgcagccgtgcatgatgtctctttaaacagactgtaaaaggaaaccaccctgggcagacaattcttggcaccaattggccagagcacattcccattgtgacatgacatcacacaactattttgattcatgggttccagggccccacggggtcagaaggctccggctgctgccgggtggagaagccacacaagtccctgggctggaaattgctgaatctaccctggctcacggttccactcaatgaaagcagcaatgccgtcttcaaggaggggatacagctccccgactggaatttaacggaaggtcttcggcaaatgcgtaatttgagctctggacttgctgagaattgcagcatgacagagctggaagagattttagagagatctagtccaactcccttctatgacagatggggaaacaggctcaggacagggaggtgacttccccaagatcctgtcgccaatggtagaaccaggactggagttctaatctccttgactcctaagccaaaccgctgatcaagtaaaacctaaaacatttataatttgtatatgttttgcaaccaataaaacaaactttggaagcaaaagatagaaaaaaaatccttgactttttgtctgatagcctcactaaagttacctgctttgctactaaccagctttgtgaccatcagaaagttacttcccatttctgaacctcagtttcccccttagtgaactaagacaagaccaggtcattttaggatttagtctagggccaggcacggtggctcacgcctgtaatctcagcactttgggaggctgaggtgggaggatggcttgagcctaggagttcaagaccagccagggcaacacagtgagacccccatctctattaaaaaaaaaaaaagagagatttagcctagttccaacagtctgaacctctcatggtaactgattcttcccaaatgactatgcacatgaggaggagactatgtcagaccagttaaataacccccgagctaaagattagtagcctgggttcttctggccgcccactagggtgggataacctcccaaaactgcaacgccatcagtttcttcagcggaattgttattatctacggctcgtccgaaaacaaggggatggagtgtggggtggaagcgccccagcagcttgccactggagcccaggcctcctcaggaaccacaggtccagcctcccaacttgggttgggctgcttttcatgccttttctctcacctctttcatttacagagctcagtgccactggagttgttggcccagtcactgcagatgcctgatgagataaagatggctccacactcgggcaacaggaaggagggcaagggaagtcttccattctatccccatgagatgaaaccctggaagctcagctcccaccccagatctgccattcccatggggcctccatccacagaagccagagatgcccagatctgccactcccacggggcctccatccacagaagccagagatgcccagatctgccactcccacggggcctccatccacagaagccagagatgcccagatgtgccactcccacggggcctccatccacagaagccagagatgcccagatctgccactcccacggggcctccatccacagaagccagagatgcccagatctgccactcccacggggcctccatccacagaagccagagatgcccagatctgccactcccacggggcctccatccacagaagccagagatgcccagatctgccactcccacggggcctccatccacagaagccagagatgcccagatctgccattcccacggggcctccatccacagaagccagagatgcccagatctgccactcacacggggcctccatccacagaagccagagatgcccagatctgccactgccatggggcctctgttgggagcaagccccccaaaatctggccataaactggccccaaaactggccataaacaaaatctctgcagcactgtgacatgttcataatggccctaacgcacaagctggaaggttgtgggtttacggaaatgagggcaaggaacacctggcctgcccagggcggaaaaccgcttaaaggcattcttaagccacaaacaatagcatgagcgatctgtgctttaaggacatgctcctgctgcagttaactagcccaacctattcctttaattcggcccatccctttgtttcccttaagggatgcttttagttaatttaataactatagaaacaatgctaattattggtttgctgttaataaatatgtgggtaaatctctgttggggctctcagctctgaaggctgtgagacccctgatttcccacttcacacctctatatttctgtgtgtgtgtctttaattcctctagtaccactggagttgttggcccagtcactgcagatgcctgatgagataaagatggctccaggctagggcaacaggaaggagggccaagggaagtcttccattctatccccgtgagatgaaaccctggaagctcagctcccaccccagatctgccactcccatggggcctccatccacagaagccaaccgggttcgggtctccccagctgagctggtctcggtagcctccatctgcaggggacacacaccagctcccaagaagcctgctcggccccggcatggctccggtgtagctggagctggttctagcatttcagatcccatcgactggtagagcaactgctcacgtgattggacctgacctattaaagatgtgtaagtgtgctcttcctgcctaggggacctgacccatctctgtctagaatgacctcatagtcataccattgcttagccgatcaagaaactatggtctcaacttttctcatgcaatttctaccaaattgactgagtaacaactgtctacttggtgctgtgctgaatgttgtaaggtcagggagtcctataaggcatgacccagcctttatttatttatttatttatttatttatttatctatttttatttattgagacagagttttgctcttgttgcccaggctggagtgcaatggcacaatctcagctcactgcagcctccgcctcctgggctcaaatgatcctcccacctcagcctcacaagtggctgggactacaggtgcacaccaccacacccaggcaatttttgtatttttcgtagagacgggggtttcgccatgttgcccaggctggtctcgaactcctggcttcaagtgatccacccgccttggcctcccaacatgctgggattacaggtgtgagccaccacacccggctggaattttctaacctacctgctttcgcttacaccatttgccctgcctcctaagcccgtggttttcagctctgcctgctgaaaccccatgaaacccttacggcccaatccagagaccgtgccttcccccaagtgagccctccctcatcactccccaaagaggggacttttctctcctttgaaagattttagctcttctattctatatgtgaatgtcgcccttaccacagagaagactgggaaccccaaaaagataggggcccaggcctcacccgttgtgaggatctcccaagcctacagcaaggcacctgctttgggaggcaccggacagtcaccctgaacgcctgcggtccctccagctgcccctgctccctgatggagccgactggagggactacctggccaggctcctcctcccgggctgctggttagctgcagccaacagtgggcacagcagacgcccgaaggagggaggagttgaggctttcatagctccctacatccctgcagggttgctctggccttgctgtgtcatctcccaagggaagaattcagctcctctcagagaaaccctccctcagacctctgtcttgggtcagggaccctctccttcatccttcaggcacagcagtggcagcagccctgctgatacgaacccgagttactgcaccagtcctagggggttcctggcagcctgcccacacctttgaaagtagtgtctttattcaattctcctccagtgatccaaaaagttcagtgtgcctcctttctcctgctgggactgactgatagatacggggatcagatatttgtagcaaggatgcatgaatgaacacacaaaataggtcttgctctcagtgactttgcaaatgagctggagacaaagataaacaatgctaactgcatgaaaaagccgtgagtatgtgagccgtggctgcaagtgtcgtcagcacaaaggaaggagaggagaaggcccgtgtggccctgcccggagaaggggaacttgagatgggccttcagggttggagggtgtgaagaagaggggggaacccaggccaggccaaatcaatgccggaggggaccccagccttcccaaacaagccgcgaaatctaccgccagctaggtcccctgatatactgatggattatttctgctgttaaatatggtagcccaaacttaactgtgattaaattctggaagtaggtaagtttaggagtttcatgtttagatgtctttttttctttttaaaaatcagcttctaacaaaaattgttttctcgatttaaaaataaaataacacctggtgcggtggctcacacctgtaatcccagcactttgggaggctgaggcgggaggattgcttgagcccgggaggtccaggctctagtgagccatgatcctgccactgcacatcagcctgggcaactgagtgagaccctgtctcaaaaaataaaataaaacaaaataaaataaaagtaacaaagcaaaacatctttaggaaaagacctgaacaagtatcccaataagaaagaggcagatttgattaaaaggaaaatgaaaaggttttgtttcagccagtgtactattcttacactacataatacaacggacagaaagaacatttcaaggccgggcgcagtggctcacacctataatcccagcattttgggaggccgaggcaggtggatcacctgaggtcgggagttcaagaccagcctgaccaacatggtgaaaacccatctctactaaaaataaaattagctgggcatggtggtgcatgcctgtaaccccagctattagggaggctgaggcaggagaatcgcttgaaccaggaggcagaggttgcgatgagccgagatcatgccattgcactccagcctgggcaacaaaagcaaaactctgtctcaaaaaaaaaaaaaaaaagaacatttcaaagtttagtgactgaggtaaatgtattgaaatttgtgtggaaaataaccagcaacttaggcaggcctgacgtttccgtgcttgagtttaaatggtcattcattcaacaggtagttattaaacctctagtaagcgtgcagggcagttgttgattgaagggatgaggtgctacaaataattcggagaaattcctgtcctctaagaaccatattttatttgtaacataataacatttactgaatgcctaccatatgccagctggggtgctggtcaccttacagttattattttatttcatccttcccacacatgagcagggcaggtataattaacatttcattgaaattgaataactgagggtcagagaagtagtttgacctggatggcacagctggtaagttgagagaagatggacttgtcccctcatgtggacccgattcccaaattcacatccttccaccataccatactttctcatccatgtgcacaggaaaattcagcagccattcaataccctagcctgaatcccataggactccagaggaccgctgtggactgaagggatttggaaaagaatttctctctacatcctgatttttcattttaggctgggaaatttaaaggcaaaagaagaagcatgtttaaaaatcctgactgtggctcacgcctgtaatcccagcactttgggaggctgaggcgggtggatcaaggtcaagagattgagaccatcctggccaacatggtgaaaccccgtctctaccaaaaatacaaaaattagctgggcgtgatggtgcgcacctgtagtccccgctactcgagaggctgaggcaggagaatcacttgaacccgggaggcggaggttgcagtgaaccgagattgtgccactgcactccagcctgtgcaacagagtaagattacatctcacaaaaaaaaaaaaaataaaataaaataaaaagtccttatttgcattaaagccacctcgcaacacagaccagacgagtcaggaggctacaacaagctgacctgccttgtgggtacaccgtactctggaagcacaaagccggctgcttcctccccgaggccacttctaggtggctgagcacagaggtggggcacaaaaaactcctcactgctggggtctttctgtttgactcacacatgcctgaaattccttacatgagggacaaagctttggatcccacgattagagatgaacgctgatgcgttgggagagatggcgccttcccattgcagggcaggggctgaggacccttcttcagcatacgtgggcgggggaaagttgaccactcacaggcggatggggacaccaaaccttcccctcttctgtttccgccagtcgatgatcccacatgaatagaggggaaactccctgccacaactgtgaccctgctcagagttccttctaacagaatgcttttcacactcagaattcttttttaaagggaggggctgaaaaaggaaggaaagaatggctcccaaataggaaccgtattttctaatgtatttttaaagggccagggcctttttggatcacagtttaaaactcacacccctggctggtgctgcaacccaaagcctggcacgggaccaggtaattcgggtggcagatgcctttatctcttagcagtgccccgtgctgtgtggccaaggcttccaggtcaccattctgacactaggtttataagatctgggagggagtgaaatcagagctcagctcattcaacgtgtgttctttacgtgtgtcttctggtggctgttcttttagatttctgactacaaacctacctttgacaactcgaaaaagaaaacagtgtggaagaatactaccacaaggcatttcatactgttagcatgcttcattgttttctggcttttggtttaattttctccccagctagactgaaagctccccgatgacaggtatctcacccgcagaagaaagaaaaggagcgattactgagttcctccacgagactcaggagcagcatgatgggtcagggaacagcaagccagctgctgctccatgctcggcatccctgggagcagcatgtcctgttcctggaggacgcttttgtggctgttctggagccagggaggctgtgctgactgctcctctgccctcggcagggctccaggcttggccagccagggctgggctgcgggaggccatggcactaggtcccgttcactctaatacttggattttaccaggtgtgccagcccccccacatctggatgctgcaaaacattccacagccagactgtgcactacacagcagagctgggggcgagagagatgaggaaggagaggtcaggggaactgcagatgggctcgaagatggagcacggtcacccctgcttcctgcacatgaggataagtggcgtgaaggcgaccacccttccacaagagacacaatggcgctcctgtggctctgatatgtaacccccacccccagactccggtgacccaaaacatgcgagtaaaccctttaattgctggaggttctcagccggtgccccggggccacgttcccacggcatcggggaagtgccaggacatgtggcacatgttgtcccactaacgtggtgctggtccaggctgcaggttggagccccaccccagccttatcgcctggtgaatgggactctgggtctccgttgtagacaccatggttggtgcctagcctccacttgtcccccaccccaccactgcagtgggcatctgagagccgagggcgtcatcaggccgagctgcctcctactccaggtagcctgtgaatacctacaggatcaagccccttgaagcccaccctatctctggacttccaattatatcaaaaccaaatttttgaaaagaccccaagctttccgtctcatcaaagccactttgcatgttatgtgaagctgcaaatagtctccttgaagctgtcactggggacccatatgagagaaaagtcactgagactccgtgtaaccaccctccctccatgcgcctccattcattcatgagactggcacttcccagggcagggctgctgaggcctgggagcaccgcgcaggcagaatcagcccggccgaccgagagatccaccagcagagcagggcagggggaaccctagtcacccacaccctgcggctgtacagagctgggagactttgcccgcagcagtttcctacattcttctcaaccatgctgtgtggtagggaggccagccatgactattcagttcaagaaataacatttttcaaaaacccagaagttcagaggtgctcagtgatttgcccaggatccgtgggcagcttgtgggattgtgggggtcgacactggctctgctggttcctcatcagggggccatcaagagccaggctgcctctgctccatgggtggacggctgcagaagcaggtgaggatgcactactcaaaaacttcccgctcatcctgaacctttgcggatcacgaggccatacctgcaaagcacccagtcccctgcacggctgcgttccaaaccacatctcattatgcaagagggcacgggtcccctccgcgccggggagcagcaacacgccttagcacatatttgccagagctctcctgccggttgcaaaatactgtgtcatgtttcatggaaagttctaaaggtcactgctgcacttgactctgagatcgccacgtcgcctcactggggcctccacgccctgccccaggaggtgtttatgagctggcacctctgcggagcaccctctgccctgactcaagcccccacgcctctgttccacgtcagcccgacacactcatggtcatgcacagcctcgtggtgaccacaggaactggagcctgagtctctgagtgacaagagggtgatttttttggcagagacaaaccacctcagctcacacagctccactcacaccagcgatatctaaggccactgagaactggcagaggcaacaggggcatcttgattttaaaaacacagagaagtactaaaaaggtgaaaaacgatagcaataattatttttagcatgccgaaatgcagcacccaaagagtaagaaatccctggatctccttaaaatctggaaggggcatcgcattcccccatggagggctcggtggggcccttttcagtcccttctcgtggtgcctggcaaccctgcagtcgctcagtgtccaagagcacaccaggccaagagctctgagggctccagcggcaagaacctgccctgattccagctgctccgtggcgcagaagctgagcgctgggctcaacgggggccaccaagcaatggcttctgaaaaccagattctgaaactctgcaggccagccatttgggttttctgtttaattctctttaagtgatttaattctcttacaagtgctgaagtgagctgggaatgcaccgaagccttggagaaggacccggttaactcccggactcagcggaaagccagtttggcctgtggtctctcacttctaggcgatggggcaggatttccagtgtctggacctgggctggtcacagagcaatccacctcctcctgcacgtcactccttaagaagcccctagcttagattatgagggctgagctgaagtttgcctcagatctctttcttcttatagtgaaatatatttcaaaacaaggtaacaggtagaaaggtttaaaacacttaggtcagagaaccttaaagcaacacaggttcacccattggcatgcaattctgagccatttagtttattcttccacatttctcccataagagagaccattttacagggtttcaaggtgattaaataagacagaatagcaaaaatatcctgtaagctgcagagcatttcacaaacagaggacatggccattctctgtccctgaaagcagcctctcaggagctccactagctcaggcacaaggtgcccgaaaggacctcgcgtgaacagctgcggaaagcctgggtgaggactgaaggccgcctgctccagtggctgctcctgggacggctgctgggcaccatgctgagaattcagaggctgtggccggagcctggggagagagcgctgggctccacgattctggcctggccaggcagcgcttggacttgcaataggagctccacaccttggcagaacctgctctggatctcagcagagaaatcagaaggaattggacaaagccctgctcatcagcccagtgctcaaagccccagcatttcacgtcctgaatgaggaatgaagggattttctcagtaacaatttactctttttaaccacacatactaagaaaactttattcgcagcaaattgtgatggggcgggggagagggtaggtaccattcaaggcaggaacatgggctgccacagagcaggtagtggcacaaggaaggagacagagagggtgagcagaactcgggcagagggcacagacatcctgcctcaaacagaagtttgttctcataactcagtggctgctgctggatgtgttgacgcatatagggtgatctagcaagaacctgactcatctataaagagtgaaattacagtacttggtatcttttgaataagaaaactgttggctctcgccagtaatctcagcactttgggaggccgaggtgggtggatcacctgaggtcaggagttcgagaccagcctggccaacatggtgaaactccgtctctactaaaaatacaaaaattagccgggcgtggtggcgggcgcctgtaatcccagttactcaggaggctgaggcaggagaatcgcttgaacctggaaggcggggtttgtagtgagccgagattgcgccactgcactccagcctgggtgatagagagagactccgtctcaaaaaaaaaccaaccaaccaaacaaacaaaaaaactgtaaagtatgtaatgcatctgacacttaaaaaagatgtatgctctggtactcgatggcttaagttccagatatctagaaagttagctcacgtggcttgttcattccttgagactggcaagatacaaaaacaaaacaaaacaaaacaaaaaacaaaagtcattctaccacttgattgttcactctttcagattggctttatcccaaatgtcagatgttactacattcacggacatcactcacctcaaattcttttctgtttatagcatcactctcagtggggctaagggggtgaaaatcacctcttggagggggcaaaaaaacttactttttttttttttttttttttgggacaaggtctcactctattgcccggggttgagtgctgtggcacaatctcagctcactgtaactgccacctcccagactcagcaatcctcccacatcagcctccctagtagctggtactacaggcacgtgccaccacgcctggctaatttttgtagtttttgtagagatggggtttcaccatgttgcccagactggtctcaaactcttggactcaagtgatccgcccacctcggcctccctaagtgctgggattacaggcgtgagtcactgtaaccagccaaaaatcttacttcttatatacaaggaacagctatacttacagtataagtaaacaatagatagtatatgtaacaatgtaaacaatagatagtatatctgttttattaaaatttcatagaggttatcagaaaaaagtcagaaaggcattttagggggtaattttcaaaagattgatttttttaaaagagagcagagggaaaactgggaaggtgtggggtgggacattgaattatctgcccctccattttaataggacgtcaacatacaaggtttaacactgataaatcataaaatagttgacgaggcatatgatttttaaaggcttcttttggggtttggttgaggagggtgggaactactgcttttcaatataaattgttttggaatgtttggtttttttaaccatgcgattgaactacttcactgaaaattaaaatgtaaaggggagaaaattgaacaaaaaaaatctggtaaatggtgataagtatctatagcagacaaaaatcagcaaggtacattctcaaaaactccctttggcaaaagctaaaataaaaataaaaaaggttgcaaaactccgtcatcagcagcggcaaggaggaaagaacatccgtgccgtgccacctggccttcgccccgccgcgcccgcagccagagagatgagctgggcactttcacccaacctgcccccagtgacgacagtgagagtatttgctaatcattcgccaaaattttaaaacacagttttctgggctttaggcaacatggggctggcctgggtgttttggagcctccgagggtgaggaagaggctgacggttttcctcatagaggcccacgggccagatgtctccagagaggagatgctcaaaagaaactgtgctcactgcaaagcagaagagatgcggttaagcaagagaactggattaaccatccatccaaagatcaaactcagaaaaggaggctacggagaatttgccatcttttctctctcctcactagaagctttaaagggatagttagaccctgagtcagcctttcacattgtagcaagcagacacctggaggggcaatgagacagtcccccgtccatcagcctatcctgatgccccatttctttgaatcagtgaactgtagtccccggtatccacctccctcactctctctgcttcctccatttcagtaagcgttcagtgtctacatgggccaggtacagagaagcagcatatgaaggtgacgttggtcatcaaaactctgctgttatgaaacatttttgtgcatcagaggacaataataagagagtgaaaaggcagctcacaggaaaggagaaaatatttgcaagtcatatatctgataagtgtctagtatccagaatacataaagaactacaactctacaacaaaaagacaatccaatcaaaaaaatgagcagctgccttgattaaatatttccccaaagaagacacacaggtggccaaaaggtacaagaaaagatgctaaactttactagggaactgcaaatcaaaacagcaatggtagaccacttcacatcctctaggacaaccacactgaaaaaaaaaaaaaaaaggaaaagaactgggtcgggcatggtggctcatgcctgtcatctcagcactttgggaggccgaggtgggcagatcacgtgaggtcaggagtttgagaccagcctggccaacatggtgaaatcccatctccactaaacatataaaaattagctgggcatggtggcacatgctcatagccccagctactcgggaggctgaggcaggagaattgcttgaacctgggaagcagaggttgtagtgagccgagatggtgccactgcattccagcttgggtgacacagcaagactccatctcaaaaaaaaaaaaaaaaaaaaagaactgaaccgttggcaaggatatggagaaactggaaccttcatacattgctgatgggaatgtaaaacactgcactgtggaaaacattcctcaacaagttaaacacaaaatgaccatatgacccagaacctgcagtcctaggtatatacccaagagaactgcaaacgggtgttccaacaacttgtacatgaacgttgatggcagctctattcacaaaaggtggaaacaacccaaatggccaccagtggatgactgagtaagcagaatggagtctattctacaatggaatattattcaggcataaaaaggaatgaaattccaatatatgccacaaagtagatcgactttcaaaacaatctgctaagtgatagaagccacatgcagaagcccgcaggtcatggggttctgtttctgtgagatatgcagaataggcaagtccagaaaggcagacggcagcttagcatctgctaagagctgtgggaaggggtaatggagattgagggctaagggatgtgaggtttccatttggggtgatgaaacagttctggaactagattggggtgatggtcgcacaacactgtgactactgagttatatactttaacactgttaaggtggccaggcacagtggtatgttcctgtcgtcccagctactaaggaggctaaggtgggaggatcacttgggcccaggaggcagaggttgcagtgagccaagatggcaccactacactccagcctgggacagagcaagaccctgtctccaaaaaaaaaaaaaatttgttaaggtgctaaattacatattatatgcattttaccacaaaaaaagttaaacctacaaatactaaaggaaaatatggattaattctacaatctggatttctaatgatgactaagtatgctcatgctattgtctaatggctattttcatgtcttttgaggattgcctaggcatgtcttttgccatactgattcaaagattcctttttttttttttttttgagacggagtctcactctgtcgcccaggctggagtgtagtggtgtgatctcagctcactgcaagctctgcctcccaggttcatgctattctcctgcctcagcctcccaagtagctgggactacaggtgcccgccaccatgccaggctaatttttatttatttatttatttacttatttttagtagagacggggtttcaccgtgttagccaggatggtctcgatctcctgacctcgtgatctgcctgcctcagcctcccaaagtgctgggattacaggtttagtaagccaccacgcccggcccaaagatgccatattttttttacagctacatggtactctgctatgtagctgtaacttctttatttcattgaactactctatttattatttatttatttatttatttttttgagacaggttctcgctttgtcgcccagactggagtgcagtgcaatcacagcgcactgcagccgtgaactcctgggctcaagtgatcatcctgcctcagactcccaagtacctgggacgacaggcacatgtctccatgcccagctatttttgtttgtttgtttgtttgtttgtttgtttggtagagacagggtctcgctacggtcttgaactcctgagctcaagcaatcctcctgcctcagactcccaaagtgctgggattacatgtgtaagccacctcacctggccaactactctcttctatgtgggtgtttaggttgtctctaatacatctgctgagaaggcctagaagcaatgacaccccaggagtgacatgcacacgtaaacactatttgccactaaaagtgacaagggctctttagagcaatggctaattccagggctggggtgaggaatgtacaagatcagccagaaagccaggaagtgcccacagcatgatggggacagggtggggatatgatggggaaagtcaaaggacacagtgatccgcctggagaggctcctgctggccacgtctaggacaatttgagcatcaaaaacttgataatgaagacatggaatcaacctaaatgcccatcaatgacagaccagataaagaaaatgtagtacatatgtgctgcggaatattacacagccataaaaaagaaagagatcacgtcttttgagggaacatggatggagctggaggcgatcatccttagcaaactaacacaggaacagaaaaccaagtgctgcatgttctcacttatgagtgggggctaaataataagaacttacgaacacaaagaaagaaacgacaaacactgggggctacttaagaggcagagggtgggaggagggagaggaacggaaaagataactattgggtactgagcctaatacatgatgaaatacgtgggtgatgaaataatatgtacaacagacccccatgacacatctttatctatgtaacaaacattcacatggacccccaaacctaaaataaaaattttttaaaatatttgataatgagaaataacatggcactgaataggatacaaatccatgagtccatagatacatacacacacagggagagaagaaaaacctgttctttaaagtagcattccaaccagtcaatgtagaattcatgataaatttagaaaatcgccttttggtaattactatagtaacaattcaggcaagaaatacatatcaatcctaaaactagcaagtgaaagtttgatgagaaagaagacatttacacaatcccaaagtaggtccccctgaagccctgactggtgacaagggggaaagtaagccctttattaaagtagagaactttatggtggcagacgcccccttcaccaagtgaccggcgtccacttcaccggaaaggtgtcgcggccgcatcgggtgaccctgctgggatgcagaagcccagggcagcccacggatgggtgggtgcccacctgagggcggaggctggctctgatggtgaggaaatgtcgaagggcaggtgacacaagaactggccgttgtcctcctgaaaagtgctcaggtcgtgacagatgagacaggactgaggagctgttccagatgaagagactgaagagaaaggacaacgaaacaaaacgcgtggctggaggtctcctcttccaagaaatgacgcccctgagacaaggcacaaaatgtgaatgaagcctgcagcttagctgatagcatgatatttgtgctgatttcctgattttgacaattatactgtggttaggagaatgaccctgtttttatgaaacatccactgaaatatttaggggtaaagggatatgatgtctgcaaattcctctcaggggttcagaattcatataaacacacagtgagagatcgtgagaaatgagatatgggcagatctggtgaaatgctaacatcgggcaatctgggtgaaaaggatatgagaactctttgtattatttttgtgactttatgtttgaaattgtcaaaataaaatgttatttattatttaataattgtttttttagagacagagtctcaccatgttgctcaggctggtctcgaactcctgggctcaagtgatccactaccttggcctcccaaagtgctggaattacaagcgtgagccacctcgcccagccctaaagtgttattttaaaaaaggaattaagaaatacaggctgagcagtggcttgtgcctatgatcccagcactttgggaggtcaaggcaggaggatcgcttaagcccaggtgtttgagaccagcctgggcaacatggcaaaaccccatctctacaaaatatttaaaaattagccgggcatgatggtgcacacctgtagtcgcagctactcaggaggttggggtaggagaatcgcttgagttgcagtgaactgtgatcgcaccactgcactccagcctgagaggcagagcaagaccgcatctcgaaaaaaagaaaaagagctacagtgggcctgtgtgttaagtaagagcatgtgttagtgctgccttttactgtctccgaaggtgggagcatcaccaaagcaggccctgagagaactagaggactctaactcgctgagggcaaggagattcttccgggaatttttcgttggcttctcccaaataataacagcctggacacaggatgtgcaggccagccctggctggggacgtcttccaggctggcgccagagggcgctgtccccagggaccacacgggatgccaggccacataactctgcaatgtgttggctgaacttttcaggaaacttggatgccgcacatacttttcctttctttgtgggcaggcaagatgagtcacgtttttctggagtctgctcagccccagtattcagacctcatcagctgccctggtccggaaggctccagctgtggccagtgagcggggggcccagggtgcccgcgttggctgggccagcactggggcttaggggcagacttgggcaagccagagtcaatcttttttgtcgggtacagggtaaagctcacagtaattctggatcatggcaacatctggggacagacccagggccctttgtacaactcacagggcacagccctgagggaggctgggctttggcttcatatagtccctgttctcccgcccacccaaccccctccgccgcacctgactccccaccacctctccaggccctaacttcgagtacctcactctccagcacttcgagctgcacctcactccccagcacttctccaggccctaccttcgcggtcccctcagttcccctgcctcccttccttccgaaggccactgtggtattggaaagttggagcagcgacctgaaggaagggaccccacctgtgtctatctgcaggaagggtcgctgcaggctctctgagaggcaggctctgggatggaaatgagcatgttggatgtacatcagggagtgctcttgggcctgacaaaggggcgatggagaccccgtgaagccccgacagagagttctgaagcccggatgccccttcagagctgtcctgagcgggggtcgggggctggtcctttatgtacatcggccggttattgggcgtaggccggctctgggaggggctgaaggctggcgaggtggtgctccttagctgagggccatctgtctgtcacacccacagctgggagtgagttcctcattcttgaaggaatcgggaatctgggaggcacggcacagcacagcctcaagggtgttctggctccagggtgttttctagcagagggcctaggggacatgctcagcatctcagggtgtttcaggcagagggcctaggggacatgagcctgagcagaggaagacagggggtgggtgtgcacaagacacagtcagagccagcccagggtgacctcagaggacctcagaggccatgtgtggtggggcttggagttttcatttaaatgtgctggggcggcgtcaaggggttgaacaggggatgacatgatgggatttatgttttaaaaacaggagttggcaaattactacccaatggcccaatcctgctggccacctgcttttataaatacttattggaacacagctgcaccattagtttatactttgtctatggcttcgtagttgcaaaagagaccacgtggccttcgaagtctaagacatttaccatctggctttttacaggaaacatttgtcaactgctgtttgaagagactcctctccttgctgggcagagtcatttccaaggcagcaaggggactctcacgggggccacggcccctcacgagccttcccagtttcaccccggtgcctaaagcaactcactttagcagttgctcgtgttctttggtattaatgatataaatcacctgtgcacaccatgaggttcctccaggaggctgcggggccctcccaggtggaagtggagaaaagtcctcagtgtctctacctgtgcgcaaacacaaatacttccactgccctctcccgcctcctctcccatcccccattggtctcctcctcttctcaggcctctccccctggaccaccagtgatgccggcagccacaggtccctctgcccccaaagcaggtctcgcctctgcaccatcggtacagtcccacaggcccctgtggcctccctgaaagtgaggagtaaaatgactcacgtacaggtcatgtgagcaatgccccaggaacacacaccacacacgtgactgcaacgaaggaagtgtgggttccttttaacgtaggagccaccagagcttccccaggaacctctctgcctctgaggcaccaaaggtttcctgtccttgcaatgctgggagggaccctagatggatttgtgggtgcatctcgggcaccccgctcagcacatggctcaggcacacgcaacgactcagtggtgcctccaggcgagcgggtacctgcgctgctctcatgctcaatcctcacccctactctgcctggatgcaggggctgacctctgacccctgctgccatgtgtccaggctcccgctgggcaggagacagggagacaccttgggcaacatctgaccatagctacagcccctttggctcccgttcctgccagacagaccaactgcagctcctggttccagccccgccagggctcccagcgccgccctcttcccttctcccacctggggtgggaaaggattttccttactcatcggtgggtcgcttcccaaactctagtctggcgtctcagctctttcctcacctttataaccacgcagccacataatcagaactgtgacgtccgtgtattaaactccatctgcttttagtacggagagtaaccctcttccaggtaggacccgggctgacagctgagctagggccatctgcaggagacgattcagacggggtcagcgctgcgattcgggggagtaaccagcggtgagcttcaggcctaaatgctggagtcctaaaattactcgagtctgaccccccggtttttggtcttgctctatatttagggacaatggccctattgatgctcactcgctgaaccactgcctggcgtttgttctgcggggcaagctggagtggggtgctcctcagccccgggagcccttgggatggaaatgcaagactcagaggctctaaattaaagtcttaaaagcttgggctcattcctccacacaaagcacaaaacctttggcattttatgggaaaacagacttttatttgaaaaataaactcaagttgctgggatataaaggaagagctgtctgtgatccaacgctgaaatggtgtgaaaggacctgaagttttacaagttaaataaacttctctgaaagactcattcgaatttcaaacagctcccagcacagatcctctgaaaaagatccccagatgcagcaggatgagacacagtgcccgctccagggtgggggtcaaccatgtggaatgggagattcggattcaaccacaaacagagaaaattaaattccttttggatgttcaaaatacacatgacctcggtcataattgtgagctagtcttggaaacggacagggggaaaatctaccattccacatctctggcagaaacccgggacttacttccatccagcggatcctctgtgccctaagaaccccccaaaccagactcgcctcaaaggcgttccagacgcattctgctgttctctgaccatctagggtggtgttttccaaactgcaaccactgcccccgccaccccatcatgaaatcaaccgtgtgggtcagataaagcagctgaaacaatagaatcgaaaataaagtacctagtcagggtcaatattgcttcgtaaaagggcttttgttgatgtgttgtatgtgctggattatgccatcagatggatttgttactgtgggctgcagtcaaaacgttttcaaaccactgctgcgatgaagccctgcggctccgctttaccatctcagtgctgtaaatcttccccgggtgtcagagtatattctccaccttttgctttgtgcttgtccctaccagacaccatggtcatcacctagagtagccttcggtgtaatcaaagtaggtggctgtctaggccagtgattttcaactcttttttttttttctagtaggacaaagataatgtcccaatgtccagcagggctgatcctgtcagtagcagttactgggtgtgccctgctgcccccatcagacaagatgccatttcttgctccgtgggggccagctggccaaaggccaccttgtctcactccctaaaagctaccactgcatgattttagggttctgggaagacagtcgcttccaaaaagagaatctgtggcatctggttttgatgctaggaattctttctttgttatgagataaatgtgtcaactacccctgaactatgtcacctttaagttctataatgtctattttaaatatttttgccagaactgtttccatctgagggaggagggaaaaggataaaggcatgttgagctctaggagctgggagcccacagaaaggaaaacagagcagggagatccaaggtccccagagacatggtgttcttcccatgttgggtgaccatcagtgtaccccaaaggttccaaaccccgaaggcactgatagacctggggggatgaggaggtatgaactggaagagcttgggaaaataagaggcaagtgcatgaaaagctcaatatgtgatttttaaagagacaagaaggcaataggaagttatcacgagagaacacagactgcaaagagacttaaaataacagctatatttcagggctctggcagattgctcaaggcaaacagaatccagtaaggctttctgtagcgggcaagacttgaaggaggtctctgaggaggcgggagaccatgctaatgtatctccagatccactgcagggacccctcactgctcaccccagccctgtctctaccatctctttactgcacagtagccagacatctctctgcattgcatccgatcgacatccgatggctttctgtatcgctcaattaaaacctggaatcctgacctctcctgcaaggccccgccccactccctgacctcactccagcacctgctccctccctacttggttctggccacattgaccagctccctgcaggctcagaggctgctcctgcctccggacatttgcatcgtgggcccctccgccaggcgtgccatggcctccacctgtcctctccctggctccatctcaccactggccaaatgtctccatgtcagaggctattgctgacttgcccacatagagcagcacccccgcagcccctctcctttgactgttgttcctcttggcacttgggacacatgacacttttccacctgtggtaccgattgtccctagaatggtatccccacgagggcagggatgggctcattcactgctgcgttcccaagggcccagcacttagcaggttctcatgtaacgtggtgcaggtgaatatcctccatgccagacaactcccctttgaaacgcctgggcaggcaggtatccttgtccgctcctaacaccagctttcttctgtctgggaggcgcatttgaaggtgaaccgcactggaaaaaacccaggcaggaacgatacctgctgctttcccccaggcaggaccaacctgctcccagcaccagactcagcatgtgaggctatgtcaccccctagtggtcactctgtcacaaagccagaaaaaccagaggtgggctccgcctggccagctgttctcagggccaaggggaccccgacctactctctcacccagactttttctacgagtgaactcagatgtaaacagacattcagaaaataaaggtgaaaaggcatctaatattgaggccacattgtcttgaatgagggagagatttaacatcgacattcttccttctagtacgggctccaggctgagcggctgtcccaagatgtggactgtggtggggtagcaccaagtcattcctacagagtttctctgttcattgcagattatgtgggaatttatcaaagattagccttttctttttttaaaaaaggaagctgagatgggaggcaggccagagagaacctaggagaagtgaatatacagcaggcagagcccagacctgagcagctgggtctcccagaagcctgtctccatcagcctgctttgcttccttacttctttgagagagagctgggtgtttgtttattgtttttgaaacagagtcttgctctgttcccaggctagagtgcaatggcaggatctcggctcactgcaacctctgctgcccaagttcaagtgattctcctgtctcagcctcctgagtagctgggattacaggcacccaccatgcccggctaatttttgtatttttagtagagacggggcttcaccatgttggccaggctggtctcgaactcattatctcaggtgatccgcccacctcggcctggcctcccaaagtgctgggattacaggcatgagccactgcacccagctgagagagttttttaaaagctggggactgccctacagcatgaggcttttgctaatgtgcacttagcatttcctctgccccagacctctgagtggctctctctctggctccagtgtggtctccttaccagagaagacttccctcgccattccatccaaagcagcacccaccccactacccactctctcgctctgctttcctttccttgacaacgtgggggcagttaaagtctatctgtgctcccgtgccccatccctcctccagccctctgtctggaagattccaggctagctctgccagcttggccatgattgccttcagccaaacagcgcaccttgtccatagctcccctggggcaaggagatgtgtcaggataaagttaggatggcttcgtggcatgaacagaaaaaaataactgaaaggaggctaagccacaaggatgcttatcacctacaataacgaacagttagtaggtaggcagttgcaaagcaggtcagcttagcgaaactgcctttgcaaaagtatcactgttaggagaaatctgacatagctgattccatattgcttctgacctccaagtgtccttggtcattcctgggcacacacaggccaagctaattttgggagaaatttagtttatagtttaaactacatacagtttaaagcaaggatgatactagcccttccccaaactaaaacaccattgcaaaactaatgagaggccgcaaggttaggattgagagaggcctgaattctgctaagatgtaggtgtagttaaatgacaaccagccattgtcccgaggtcacaagatttgtaacttccccaattactcctgtagataacatcactattagagaacctaagattggccttttgagatgtctttccagacttctgcatttctggcaaccaatttgacctcacctggactcctgactcaccacccaaccagtcctgtggccccacccagaggaggagtcagtgtcattttccacacccctctgaaggcatcccaactaatcagctgcacccattccctagtccctgcccgccaaactatccatgaaaactgctaacctctgagccttcaggtagactgacttgatttgatagataactgtcctgcatggcatgaccggactcatgtcagttaactctttctttactgtgacgccgtggtctcagtggattgagtttccctgtacaagaggcggaaggacccatcgggcaatgacattggtgctgccaactgcgtggagaatcacctgcccacctttccactcagccaccttgtgccttgacctttgtcctcatggccctagaaaccatgtccccagaccacagtcaaaggaagaaaaggaaatttatccccgtgtgtcttttttgttgttgttaggggacgcacgtttttcttaaatccctagccgacttctcccattcactggcatgtgggaaggggatacttctgactgaactagaccaactgcagctcatggcctggggccatgccctgagttaaaccaggttctgctatgaagaaacaagaggcagccactgtccgatgggttagcacagtctgctgcgcacctcagcgaggaacaaactgtgcacatggacaaatgtgatggacttagcgggagaaggggcccaggacaggtggggagaagacgagaggaaggccctgcatggtagccgagggcagcaggatcccctacacgcatctccagggtgggaaatgactttccgcagtaggcaggcaactgttgcaagaatgagcccaatggaggaaggaggcttggctatctcacagtattgacacacgtactcacacacatatgttaattcttacatatacgacgtatacgtaagcttaaggagcaggtaggcaggcacaagaagcctagctgtggcctactgggagcctctaaagggagccaccactgagaggcagtgtcagttctgtgaggatgggggctaggaaggctggcatgggcaggtcagctattcatgggagcaaaatacaggggtttggtggaaaagaggcaaactatgccaagcatcctctgtgtttggggcagactagcccacgcacatcgaccagcacctctgagctgtgtgccgtagaacaagccacttgccttttgccaggatgagcagctgccttgcaggattgccatgtgttcagaattggactcaaaccccactgaagctcactgctaaacactgaggggtgggggacacaagagaggtccatctgcaaccctaagaagcatcctttacagagcagacggcacattcagacacatgcccacagcgcggctccctgactgatggctggctgggataagggcaggtctgtgaggacaagcagcctcatcaagaccatggggacaaacaggaggcgtcccccaaagcaaataagccagcagcctgagcaggacaaaagccagcactagagatgggcagggctcccgagtcgtgacagctctgtccctgctccctctaccggctcctcccctctcagcctgcacgtgcttctcccaccttacaaagaaccaactgaaaacgtccattaaactgaatccatcccctcgctaccagctcgccttaattgtcgggtgggctcggaagtgccacagtaagaattaagcgccagaatctaagctgagcccctaaaaaggccacacacagtcagacgcagccaaggcaggtctcacgctaaggcgggtctcctgctgtcctgctccctcctcacctctgtgtctctgcctccagccatcccggcacagagtcgagcacacgggttgctcttgatgtcttgggtgggaagtgacgcctgtcctctctctttggtgaaaccccatcatgtggtcccaccctgaccgcaggggtgggctgggagaggcagaggagctcctggctcttgcacaagcaccaagctcctggcacagatgcatccacctgcgcttctgaccccagggccttgaaggaagttcgctggctcctcagccactgccccacacgctttccttcccttcctggctactgaagctgctctcttggaaatcaccaatgacctgccaagtccaaagcctggccggacctccagggctgatcgtcccctctcttgagggactcttctgggcctctgtgacccatatgcctccttggcctctttcatggaccctgggcctctgccctccctcgtgtgccagccatacccagctgtctgtctccagatgccgtgcctggtctggctgatgccgtccagggctatagctgctgcctgtgtcacctgacgagccctaacacccatttgcagctgacagtgccctgagcccaggctccccttggagcttgcaggcccggaaacccgcaagctctggacagaacatgcagcctcactgctttcctccttgtgcgtctctacaggagttggtgtctaaaagggacaaaggcacactccaggtggagaggggcacaaatgaagttaaaaccaagttagacagggctgggacgggcagacagcctggcagaggagggaggcagtgtttgcgcaggtggacggggtgtgaattggggggtgaggttggccctgatctggcaagcagtttgagttttctgaagtctctagcaagggaatgacataataaaagtggtgatggaaacatctgtgcagcagccgctttgacagatctgcaatcacagctctaatggccacaggggacacttcaggccactgccctgggccaaagccagagcgcagcccagcccaggagagtgatggagagaccagcgctccagaagggagaaaggctgtccagagacccagaggttggcgcccttccttggatgctttttcattttgctatttgtcctttaagctaacaaacactcaactccagctctgatttgctgacacctgagctgagggcctagggacctgctacccccgcccagtactttctgactgtccacccccagtgccaagagctctccacctgtcagacgacccagggagagcggggaagtgcctagaggcatcccaggactgcgatggctacaccacgagtgctgtcaactccttagttcatgagtcctaccagaagcccggagacctcatgacctattcacactgtcctgcctcccacccaaccatgctcccaggagcaagtgggtcaggggcagagccaggaggtgggggcagtgtcaggatggtcagggtttggtcccaggacgtgggggcagggccagcaggtgggggtaaggcctcaaggttgtagagagacagggactccttccccatctgtgaagcatggggaggctgcagtggggactccaaggtaacacacctgccctctgcctcactgaaaacaacagaagatcatggctgagaggccgagcatcctgtctgctgtgtggccatagctttcctggacatttgctgtgtctgttctctggctgctgtctatggccaggggggcttaagcaatgggatttatcccttcacagttctggaggctgggagcctaagtcaaggtgtgtgtgagcccgcagtccatctgtattagtccgttctcacactgctagaaggaactacctgaaactgggtaacttatgcagaaaaaaagtttaattgactcacagttctgtaggctctacaggaagcatggctggggaggcctcaggaaacttacaatcatggcagaaggtgaagaggaagcaggcacgtcttacatggcatcaggaaggaaagagtgaaggggaagtgctacacacttttcaacaaccagatctcgtgagaactcattcactatcgccagaatagcaatgggaagtctgcccctacgattcaatcacctcccaccaggcccctcctccaacatgtggggattacaattcaacaggagattcgggtggtaacaagaagccaaaccatatcaccatctgaaacctgggggagccctttctgccctgcagcttcagggatcacaggcaccagggcatccccgtctcagctccaccagctccctgggtctccgtcatcactgggccttcttttaaggacaccagtcattctggactgagggcccacatgaatgacctcatcttaaataattacacctgccatgaccctatttccaagtcaggtcacattctgaggtcctgggggtcaggacttccacaaaccatttttgccgggaacatcatacaacccttaacagttactataggattaaatgaaatcctacagtgtattttaaaactctatctaattgcacctgaaataaattcttcatcttgtctaattccccaattagccctggcctgataacttgattttcattcctgtgtgacccctggcactcctgacccactaacctgatgctgatgatggcatcatgtgtctggattggggaccttcctaacgttgacaggtgattcatctgataatggttttgagtggctattgtgtgcagatcctactcaggtattatagtatctccaggaactgtaataaacagcaatttcagactcaattcatctcctttatctgtgacactgtgtgaatgggaacacaatggaccaaaagaacactcagcccatgccaaaatctcccaaaggacacagaggtgtcactgtaacttctcacatatgcgctgcacgaggactcggctgggctgcagatctgaaacctttgttcttccaacttcacttacagcagtaaagcccatttatcaaaatctatttcctttaaatgatggtaggaacggggaagaagtgaggtgggggagaaacttacaggaagagtcttgtcaaaaggagacattttggagtcaacaatggtaggtgggaggttggtgggaagtgaagctcaaacacagttcactcaacaacctgtactcagtaacaacagacatgttcatctcactaaaaaggagaaaaccaaaggcgaggcgcccagatcgtggataagtcccaggagagagtaaaagcagagtgctgagaccagctatcaccctgatttggaacactggctcaggccactttagaaagggggactggggatgacctatgcccaggcactagtgtgtttcaagaaaaaggtgtcagaggactgcaagttcacagacacctgaagacagtggggtctgctactgtgtgggaggctccctctcatttatccgtcaaggcccgctaaagtgtctccatttatcacaacacctctccgagccagtccggcctaccactaactcatctttctccaactctgtccgtacctacggcctgtgttgttccattcagcacatcaatcgtggagaaggcaggacatatccattccttgatagtcctatgtcatgggttgaattgtgtccctccaaaagtcacatgttgaaatcctaactcacagcacctccaaacgtgacctcatgtggaagtagggtcattgaagatgtggttagctgagatgagggttatactggagtcagagggtcccgtagtccaatagggatagtctccttagaaaaaggggaaatttgaacacagagacatgtgcatggaaaaacctctgtgaagatgaaggcggagactgggggctgtgcttccaagccaaggaatggcagtgatgaccagcacagaccaggagaaagaacagacgcatggaacagaccccctcacagcctcagaaggagccggccctgcccacaccctgattccagacttccagcctcttgagataataaactcccgttttgttttattttgttaaagatggggtctcactctgtcaccgaggctggagtgcagtggcctgatctcagcttgctgcaatctctgcctcccgggttcaagcgattctcctgcctcagcctcccgagtaactgggattacaggcatctgccaccatgtgcggctagtttttgtatttttagtagagatggggttttaccatgttggccaggctggcctcaaactcctgacctcaagtgattggcccgacttggccttccaaagtgctgggattacaggcgtgagccaccatgcccagccaacttctgttgtttaatgcacgcagtttgtggtgctgttatagtggccctaccaaatgaatacacctgtcatgatttgtagtcatccacactcgcttagatatcagtgcatgtgagtgaggctcaaagagtaccagctaattgttaaatcctgtggcaagtcactctgtgacgtgagtcattactcactgacttttttgaaaccaaatgtttctgtcttagacctgctcaaaggaagaactggccaaaagctctggttcctcttattctgattatggagccagagttaagtgctgctgcccagagattctcatttctccacagcctcctttttctctcagccattttcctctagaagcagagcctgaggcaaggattaagatcaaggtgaggtagggcaggagaagcagcaatgaaatgagttgtcatgctggctgctgatgcatgacaagctgcaaataataacataataatcagaataaagagcaggggagcttagaaagcatgttcacttggctcatgggactcctccaggagggttctagaaaggaactatatgtggggggatccatagccatcatcaaggaggaggtttctgcccagcttcctcaaagccacagttcctactggtcaagtattactctgtggagagctaaactcccccaaacttctaggctgtatcatgcagccccttgtcatcattcatgaggccaaacttcctgcccaaattttaggatattcttgaggtaaggggaatacgcctgcaatgaccccaccaaaaccccattagcaacggcaaagcttaaataaatcagaagcttcatcaataaagtttagaactcttgttcttcaagatctctcttcctattctttctttctttctttttttttctggagatagagtctcactctattgcccaggctggagtgcactagcacgatcctggctcactgcagcctctgtctcctgagttcaagcgatcctcctgcctcagcctcccttagtagctcggattacaggcacatgccatcatacctggctaatttttatatttttagtagagacagggtttcgccatgttggccaggctgctcttgaactcctgggctcaagtgatctgcccacctcagcctcccaaagggctgagattgtaggcgtgagccactgcacctggccagtcttcaagatttttccaaacagaccaagaaggctgcagttggtgccaggactaagtcaatggacaaggacagcccgtgcctgaagaaacagcgactctgtagccttgctctttcttcccatcctgggccactgtgtcatgattcttacccactcctaatccaatccccacttgcaagacctcaacagacttggagttctaatgcactgtggccttcctgtccccctgagatgctccaaagctccatggagggtgtccccccagtgcagggagcaatgatgctatctggttttaccaaagggctgtgtcagctgtgctgggcaggcagctttctacagtgttttactgcatttaagagtcacaagaagaaactaacccaggcagaaaggctgtgaacaaacctcagtcaagcaaagaagagaagacaagtgaaagtaaacatcaaagaaaatggcccaggaactttgaatgcagttgatgctgtggttgtagactgcgctgggttagacagtgcccccactaattcatttcctttccagaacctcagaaggtgaccttatttggcaacagagtcattgcagatgtagtcacttaagttgaggtcgcagtggagtagggtgggctcttaatctcctttgactgctgtcactttaagaaaagaaaaagagacagacacacacagaggaaggccacaggatgatgaaggcagaggctgaagttacgcatctacgagccaaggaaccccagggtttgtgggcaactgccagaagctaggagggaggcctggaacagagccctcccagagccttcagagggagcatggtcctgctgacaccctgattccaacttccagcctccagaattgtgggaacaggaatccgggcagcttaggccatgcagcctgtggtgcctgtgtgacagcccctgaaactaacctgtgggccatgaaggcacggatgctgcagccgcatctggggaggtgtggcggaaacacgaggtgggcaggtggcactgcttgcggggctggggtgctgggctgacatggccgagggtgcacccccaccccatagagtgggcacctaacctgctggccccagagtgcgtgtgtccactgctagggaccacggaggccaaattcagtaccttttgagaaataaagctaaaattctaagcccctaaccaactgaaagaaccccctcttggccacggggaccccagaaaaaccttaaaactgagttcccggccataatgggatgagaggtcggatgtgcctcattacaccccctcccttgctaaccaccattaggcttccttccccaagggttaaatggaaacctgcccttttgaaagacttgctccattcctgagatcaaccagctgtctgatgctgccccttccttttgcaggttcgacacaaccgaccagcattccttcctgataagagacccctgaccatggagtggctctgactagcctatggaggctgcacacagacagtcttcgcatccttggcttcaccctctgacatatagggcctactgtaatccatttaaaggttaagtctccaccccagcgtgaacatggatgcatgctgcacacaattagccaattatgcatgtctatgcttcctctttgtgaatattcatagctcctcctataacctgttgaatatgtacatttggccacgctgttcagcataaatccctgtcttccactctcgcagtgcctgtttccagcatctggctagagactatgcttcccagcctgtcagaatggtgacctgctggctgcagcctttttaaagaagtgatcctttccaaatgtaggaaccttatcattcttcaactgacactttgctggtcactgagcaaggtgtgctgggaggagtgagggctctgaggtctcgcaggttttctggggagcttgattcttatggagtgacctacaaatagcacatgtattgaaaacacatcaaccagtctcagagcagccctgtctcttgggttttaggagttcgacctggagctgtaggggggtgagatagaaagtggcctccctcctggagaacccagtgaacaaaccaccatgccccacgccccatccccgactttagcattaagcgttgcagaggctgagaagtaggggttccagccacggttgggtcttgtgttgaccattttccagtgcaaccacaggctccctaagattcaagcagcactgtgggcttatgacctcacacatttaccattgcagaaattatgccaaagcatgatcaaattatctgcccacaatgtataggttgcttacaaaaataaccagccctcctctgttccttacttcaggctctaagatctgcctgatttctactactgtaagaacatagaaagtaatctcattacatgcatgatttttaccctatcttcattccagctatgttattctttatgcttttcccttagctaaaatttcgatttccgctttacatttttggcattttaaaataaaacattatatcacttctatcagcaccacgtttcttgtctttccaagtctgctgatgctttcaaaatccccacgtcccaaactcagcaccattaaattggagtgaggctggtggtggaatgggaggtgggtgcttagggattattccacttcctcctttcctcctgcactctgttccaaagccagagagctccgtgtccttttgctgtatctgaacaactgtgggaggaatcattttgtatgcatgcagtacacacaatgccatctttcctagaagtctcaggctctggggtatatatcaatatcacctgaggagcctgttaaaactttcgattccaagactcaggccattgagtcattcgcttcactggtttgtaaatatctttgtacattagggatattagtcctccatcaattcatcatctccttctggtctagcacgtgtttttcacgtttatattgttgttttgtttcattttctatttggagtgggaagctgtatggaagtggtcatcttgatgtcatcaatgataattgcctctgtcccttcacagtttctggacccggtcgggcttacatatgacccactgaaatccctgggtcagtatagccatcatcttgtattcagaagcatcagcccacattttagaaagcattgaaaaacaagttaagttgttggtgaattaatttcaaacaatttgctcagtgccttcaggcgccattctagaccctgagaaagctttgaataaaacagaattcctgtcctcagacagtttacactctggtggggagagacaggcaagtgaaccagtaaatagacagtatatcctgtggggaatcagtagtgtagatgcctgcaaggagattgctactactttacccagggtgtcaaaggaaggcctttctactaaggtgagtcctttcaggaaatctgaagaggtgtctggagaggctgcctgggagccagcggtgtgcttatattcccaacacacataatgcccctttcagggggtcatctcttctatccctctcccaccatcctacacagcacaagaactgggcttcaatctctggtatgacgctcccaaactctccaaaatcttctccaaccaaaactcaccttctagaatcttcccttcactcacctggacccccgttatgcatttctctcttagacattcttcattctttctaacaggaatgcatccagctctcctctacctcatcaatatagcaaagctctgagaatcaagcctgcaaactttgagagaaggcaagaaaggctgtggatatttatatcacaaacaaacatattttttgcaccttctagaaaggcctgacatcccaagatttagatattcaaatgttttggaggtacattacttaaaacacttaaagtttagttccacacggaaattattttggtgtgaccaagagccaggtgtggtggttcacacctaaatcccagcactttgggaggctgaggtgggaggatcgcttgagtacaggagcttgagactagcctgggcaatacactgagacccaatttctacaaaaagttaaaaaattaaccaggcatggtggtgtgcatctgcagttccacctattgcgggcaaagggcaggaggatcgcttgagcctgggaagttgaggctctgcagtgattctgccactgtactctggcctggatgacagagaccctgtctctaaatgaatgaaagaaagaaagaaagaaagaaagaaagaaagaaagaaagagagagagagagagagagagagagagagggagggagggagggagggagggagggagggagggagggagggaagggaagggaagggaagggaaggaaggaaaggaaggaaagaagggaagaaaggaaggaaggaagggaagcaaggaaggaaggaaggaaggaaagaaagaaggaaagaaagaaaggaaagaaaggaaggaaagaaaggaaaggaaagaaagaaggaaagaaagaaagaaagagaaagaaagagagagaaatgaccaaggagccacttttatctattttttcgtaaatggctagctggctatcccattattggtttatagatccctaagatctattccattaaagcagagtctcagcacctggactaaaagtggacttcggagttcaaccacctgacttcacattttggctttaccacttggtagctgtgtggcctttgttccacaacttaagccctcgtgcctcagtttctagtttggtaaacattgtacaaatagaagagttgctatgaagattgaaagaattacatacaatgcacttagaacacacacagacttttataaggagcaaaatttagcaacacgacattagatcattctggaggtcctgccttgctgactgtgtaagattctttttgcttttttaaaagactttaatcttattattggcagttcatgaacacacagacatgcactttcctttcctcatctccaaaggcaagatcaccctaaaccaacttgcaaaatcttttgaagctaaagattcactgttctggaagctcctgcagccactcagccacgtaataattcttgtggcacaaggtcagccaggtaaacatttcaggctttgtaggccatggggtctctgttgcacctgctcagttctgctgttgaagtgtggaagcggcaggagaggaacacacagatgggcgtgactgtgtctccatgacagctttgtttacaaaaagaggtggcacgccagattttgtcccggggctgattttgtcatttgctgactgctgcattagagggagagacggaaaagtggggcattgttttggttggggtgtttgactctgatcatcaaagggaagtaggtttgatattccatggtggctaggagtatgatgagaacgccagccacactacgaatcctcacgctactgtacctctgaccagaggcaaatgttagtgaaagactacggcaactccatacaggcagcctctgagaggtaagatccttccagaagaaaggtctggttctcttccctgggcaaaaaacaccagccagcctaggtacttgctggtcccaagatcagctgtggaatccagaaccatggtccccatctgtgttccccctcctgtcttagagtgtcttagaagattgaattacctctttttcctttttcatttctccctctgaaatgacagtgatcataattttcatcttcctgctttctttccccttaataatataaaacagtgtttatcggccaggcacagtggctcacacctgtaatcccagcactttgggaggctgaggcagatggatcacttgatgtgaggagtttgagaccagcctggccaacatggcgaaaccctgtctctactaaaaatacaaaaattagccaggtgtggtggcgggcgcctgtaatcccagctacacaggaggctgaggcatgagaatcgcttgaacccaggaggtggaggttgcagtgagccgagatctcgccattgcactccagcctggtgacagagtgagactccatttcaaaaaaacaaaaaagaaaaagaaagaaaacagtgcttatcaagctctggtgtatatcagtattacctgaggagcctgtcaacactttagattctatgtttgtcatgtaggccataaattataggacagaaagatgagatgcaaatagaacatgaggagaagtgggcattaccttgagacagaagactcagaaaacaggggatcatagccacatcctccttaatgtcaaggctggatgtgaggctgcatcgccctccatgggggaagcagcttacacaattgtatgtaggctcgttgggccacgtgtgatgagggcatccttgcgtgcatgcacacatgctggccaaggagggtgggatgccacagtcccctttggattgccaactggacctcttatcctggaacttcccgccctacctcctggttcttggtcattctgtttctcctgcgtgatcctaccccccaccccgccctgattgattcagggatcctaactgggctaatcagatatcctgcgacaaggcatttaggacagtaaatggagagagacacagactaggacttctctggatctcttggaaagatccacgaattcttgctgctgaggcctcagggccagtctggttccttcccttcctgagtcctgagggttcagctctttttggaattccgtaaatgcccccaaatccttccaacacattgtttgcttgttaaaaaagtggtcgtgtgaatataaaagaagagggacgaaaactggattcagaaaggctggaaatgtatcccttaatgccttttgtccagatttggttcaaaggcttctagcagccagtgcagacagaggaaatgcgctattacacgattaatgtctgctagagacaaaagcagtcccgttgatcagaagttcagctattcttggtaccaagaccagacagcaagttcctcccaggggccttgtgtaatgaacgaagtcttcatgacatccctccagtggacacagtggctttcacggggctgtttcttcccaagaccctccagatgggccgatggcattactcacaggctcaatttcatgaagttagttctagggcagtgggggagcaatctacagtctgggaaccctgatccaggaatagatttcaagtacggagaaaagcagacagattttgcctcctccaggccagcctcatgccaggcacaaatgaacggccatctggaaggagctcagggtgacctcccagtcaagtaacaccacagcacagagacctggagcttcgtgccttatcagccatagggctcggggagggatggcttctttcagggaaagccaaggagctggcctcactgattctcaagggcaccaacatgagcaattgccctggggaccaggcttgctctgttctgaactccccatcccagggggcttctctgaagaagccatgcccccaccccaacctaatcaatccttgcccttgtgagtagctgagagccatgtcatagccttcctgagcccggcccctggctgtctaccccgatggtgtaaccgggctgtaacaggctctgccttctccatagtacctgacaagccagaagagtgaacctggggattttctaccaaggacattgaagggccttggaaatactcaacagaaaaaggcagccgaaaggagccaggagtcaggcctgtcttcagtggccaacgtcccaccatgtccaccaacaataaagagctgcagtgcctgactccctgtgtcccaagggagggcccaggccccgggtacacacgggccccagcaggcagccccaggtcccgctcccttcgcagctgtctgcacttctgccataggaaaaaagcaattcacaggctcactgagctcacagaccacactcaggcctggaggaaggcgcagatggcaggcccagccggggcagtgcaggcaccctaggtgaggaagcagcagttttaagtttctggaatgagaggtagctgaggggctcatataccccagtgtgtggattaggggcacaggggtgtggagctatgagtggactgtgggcccctacccagcaatgaggccttcaggtacattgcagaggatgatcaggggcctcacagtctctgcttctgagccccagcctcatccccaggaccccttgggtgctggacactgccggggtgaggcctcccgaaggtacagcccccacattcctcagcccgcagctggagctcctgcagtacaggagatgggttgggggactcactctctgactccacctgcctgtctcggcccctggctttaaggaaagggtggaggggagtctgggagcttcctcctgtgcagaccacaggccccaatggaaggggccatggccaggttcagcatgggccccgaggtctagctcttcactgcggcagcaccccatgtggacaccagcagagtcatccccaggcctgtgcctgcgttccctcactgtgagcacagtgtctgctgggacccgctgagatccagaggggctgggagtcttggatccacctctgatagaggttgagtgtttcttccccgctctcaggttgaaattggatccccggtgttggaggtggggccccgtgggaggtgtttgggtcctgggggcagatgcctcatgaatggctgggttgcctccctgcggcagtgagtcctgctctcttagctgggtgctttaaagactccagtacctcccccctctctcttgctcccttgcgtgtgagctctgcataccccggctttccttcgccttcctccatgagtggaagcagcctgaagcccttgcaaacaccttggcagagatcacgacagcaggagaaggtccagcctggcccactccatcctgcatccagcctcacaggctggctggctttgctcattacctgggcggaggccaagctaacaaagggaggaatttagtttatagtttaatttgaaagcaaggatgataatagtacctccctgaaaccaactgttccttgctcagggactgaaaaccagctttgtgagatgaatgaaagaccacagattaggattatgggaggggcctgaaccgggctaacatgcaggtgtagtttctatgatctcgtactgctctggggtcatggagccagaggtcacaagacttgcaacttccccagttgctcctgtagatagtatcactatttaacacctaagattggtcttttgagataattttttagacttgaattctggcaaccaatggaccccacccagacccatgactcatgactcagctgaccctgtggccctcacctagaggccgactcagtgctggaggcccgtttccacaccactgtgatctcatccccaaccaatcagcagtgcccgttccctagccccctgcccatcaaattgtccataaaaaccctaagctctgagcctttggggagactgatttgagtgatagctccatctcccatgtggctggcctcacattaaacattttactacaataccaagatctcggtgaattggttttatctgtgcagtgggcatgaggctcccactggatggctgtgccctccccagaagcagatgctggcaccatgcctctgtgcagcctgcagaaccatgagccaaataaacctcttccctttataaatgacccagcctcaggtactcctttatagcaatgcaaaatggagcaacaccgcctcccatcctggacctccacactcagccatctgtaggttctccccatgccttctccaagccctgctacatcccagcattccccagctagcccttaaggctgagcacggggccttggctgtccccaggcattcctggtggctcaactctttcttctgctgttaccaacacccgcaacttctgttccacatctcgccaccgccccaaagctcaggtctgggagcttgacatttttttcaagatgtattcatttttaattaccaataagtgaagctagtctcaaaaaattggaatatcagataaagcaacattttccttccacccatccactcctaattcttcacttagaagctaccactagcagtccaatgcatgtccttttaaaaaataaaaaaggtatatatgtgtgtacacacatacatatatgcacatacatacacacatacatctatacaaatccaaaacacacacacacacacccatatatgctgtgttcaaattattatatgcatatgctttcttcccccataaatgctttccttacagtcccttctagctttgattatctgtctgtctgcaattctgtcagttactgaaagaaaacagttgaaagagattgaaaatctaaacataaataacaatgaaagatagtgaaaaggaggaatactttaagaaattgatatggtttcaaaaagagatttttccagacccagtttctaaaagaacagctcatttcccaggctgaacagtggacagcaccaaacctcccaccaaatgctgtactgagctgcagcctaggccctgaggactgaacaacttctcctgcacctcctggtgccactgctgggctcccaaagggaccctctgcctgcagggaccctcctcctcctctccccgctcctccctctcaccctctcctcccacccccatggagggctctgtgcaggagaatgatgtagagggaggcggagggtgatggttcctgccagagcttcaagaccttcccatgggagccagctcacagctcctacactcctttgggcacccttccgatcatcaggttccctgtgctgctctccgccccgctcagaaagcctgccctgtcctaactgagcacaggcagtaccatggagacaatctcgtcctttcttctgaagcctgcttgcctctgactaggagcccttgaaggcaggaatcctgtcttttcatccaccaattccagcacattcaatctacacaacatcgcaagttccccaacaaggcaaactgcgcacacatcctccttctctttgacaaatcccacctgtgtgacgtggagccctcacgcagctttcccatcaggacgggcctgatttccttcctctgtacagcactttgatccctcatctctagacgatgtttatacaaggagatggggaaagaaaggggcaccttaaggctaaagtgcacaaacttaaaggaaattgtgacaaccccacagccttgagtgaggggtgtgtgtagagcatggtcaggacctgccccccacaacacacacacaacccacaggcgggagcaccttcatttgttttatgtagaaagacgaagtgcaaaatctgtccaagagatagatctgctccactcacacagaatacggccaccatcccctccacctccaaggtggtggatgaagtagtgaggctgacagagacctggcttctcgtcctacagccactgctgcctgatggaagagttcgaagtcagaaacaccgaaattcccctcttgctgccgcctggccttgcagatataaagcgttgctctaacacacagtattgccagtctttctgagtaaaagtcagcctggagagaaaggtgaactatcccaggcctctgatggtcaaggacaaatttgttttccacatcactatcttccccaatacaaatgttctaagtcagtagaaagaactggaaagaatagacaaaggaaaggagaaagtaaacgccataaactttctagttcgtggtatatttcatattatcatcgacggcgctcaaatgaaaataccttatcctcagatcacaaacactaatgaacctacggaactctttcttaaacactcacatttcctccttccatttccccagcaaatccctcctagcttccattccctgctgcccagagccccaaacagaaaaagttaggatttgccagaaacaggtgtagtcaaaccctcaaataccaaaccacagagagtggaagccatatcaggctgaccaaagcagtatggtcccgtggccccgggtgagggcctaagcttggctccatgcctgcagtttccagagaaggctggaggcaagtgtgtcatctgattgtccatacaagctgtactgtgagtatcaggatgtttacagttaacccaaggaccttgctggaccagaaggattacgctttgatagattagcatgggaagaaagtgacaggtggaaactgatgttctggagagagatttgtttagggggaagtgggggtggggagaaacagatacaggcactcagcaccaagctgctcacagccacctggcagcttcggtgccaccgtggatgtgtggctgcagaagagacccccagcaccccagcacccacctgaaacaatagcatcaaggtcttactttttctggagcgggagaaaaacctgatgcccccgggcgaggtagcagggttggagttgggggaagactctttggaggaggagcggaagatcccactgaagctcatgcgtcgaggggagcgtggcggggactcctggtaggagaacgggaacacggttttgggagagccggggctggtcttgggcctcacaggtgcagacatggggctggagggccggggctgggggcctctggagaagaaccctttggaggggctgcccgggccgaaggggctgtccacctgcagaaaaacagacgaatggatgcagtcactccacgctctggacacgctgcctcctgccctgtatgaaacttatcattgtcctctctcacatgcgggccccccatagtaccctcccagagaaacagccctaagctcttccacagaggtagccactgaatggtctgcaggtagcacctgccccaaggatggcccctcacaggctggcagcaccacgtcctggaggtccactgaccatcctgtcccactccttagaaggggcttccaggaggtagaggggaggaagggaagcggagctcaaaatgagcgtctccctcctttattatgggcctgcctgccttcacctctcaagacctcacgtccatccaagttctgaccacacaggactgcagtcctcttgcctgcctataagatccctatgttccagaacagagcgggcctggagctccatcctgagacctcagtcctaggtgatgatgaatttttcacctccaagctgcttcagcatttgaaagactgaggttgccaacagaagtcaggagaaaagttcacaaagccagccgggtacggtgactcacgcctgtaatcccagcattttggaaggccgaggcgggtggatcaactgaggtcaggagtttgaaaccagcctggccaacatggtgaaaccccatctctactaaaaataaaaaaataaaaaaaaaattagctgggcatggtggcgggcgcctgtaatcccagctactcaggaggctgaggcaggagaatctcttgaaccccgaaggcggaggttgcagtgagccgagatggcgccattgcactccagcctgggcaacaaaacgagactccatttcaagagaaaggaaagaaaggaaggaaggaaggaaggaaggaaggaaggaaggaaggaaggagggagggagggagggagggagggagggagggaaggaaagaaggaaggaaggaaggaaggaaggaaggaaggaaggaaggaaggaaagaaagaaggaaagaaggaagttaacaaagccccaaacctctgagactcacttcaccaatgatttaaaattctagtcatggcttaaaaaattatcagaccccataactttaagccaaggcacagagctcatagcagactttgagaaatatctcacgtgcccgcagccgtgttcctgctggatgcgtggaggagctcctgccctgcctctgggtgccggtatttggcccctgctctgccacctgctgagccaacctgggcatgttacttggtctcaccgagcctcagctccctcatctgtaaaatgaggatggccgtgccctcacctcaagggctgcttgaacgtcagatgaagccgcgtgaggccaggaagcacacggtgcgtggtaaacagctcttgtcctaccacttgggaaacttgcaagcaacactgagtggaaaggacctcagagatgacccagttcagaagcaagaagggcgagtaactcgtccgcagcgctcgcggggagccaggaccagggcagacgcgggaaatactgccctcgggcggccgcgctgtgctgaaaagggaacacaggacaccccacaggcagcctcggtgccacttcggggtctctctgtcccaccacggggtgcgctgtccggaccgcggcctggggacgttcttccgccactagagggcggcccaagccccgagcccgcggccccgggaggataggatgcccgtggcgtggacccgcgcagcacagcctccccgcgcggcctctccagccgaaagagccggcgccgccacgtggaggtgtaggtccggcctggcgcggacaccttcgtgagtgggcccggcaggaagaagagtgtggtgctataggaccttgtaactcaagctaagttttgagtttttctttttttgtgtagttctgttttttgtttttgagacagggtctccctctgtcgctcaaggctgcagtgcactggcgcaatctcagctcattgcaacctccacctcccgggctcaagcaatcctcctacctcagcctcctgagtagctgggattacagttgtccatgcccagctgattttttttttttgaccatttaatatgaaaagcatttagattctctgtttatagaatatcccagttagccactattccacctaactatgggaatcaggacaaatcctgagaataaatttacaaacaagagagtcttcaggcagggggtggtgtctcacacctgtaatcccagcactttgggaggccgaggtgggtggatcacctgagctcgaccagcctgggcaacatggcaaaaccctgtctctacaaaaaatacagaaattagccaggtgtggtggcctgtagtcccagctactcaagcagctgaggtgggaggatcacttgagccccagagatggaggtggaggttgcagtgagcaaggtgacactactgtactccagccagcttgggtacagagcaagaccctgtctcaaaaaaaaaaaaaaaaaaaaaaaaaaagaggttcttcttcaagtggtgggtgctgtgtgtgcaggtctagggtgggatgggggctgagagaagccagtaggaacaacacacacaggcaccagggtggtcctatcacaaggtgacataagctggtcctgggtggaggcccgggtttggtcacagctcagtttcccgcaatgtggacaacgacttggttgtccaagcctcgttcccagggctgagacaatcacgacagcagcctcgagggtgtgaaccggaagaggagccgaggccacatgggaggaccggagggaggggtgggattttggagctgctggaaaggtgagcccggacctggtgcatggacgtgctctgtttacagcatagggagcttgctggggagccgggggagagggccgagccaatgcaaatgtccagtcctacagggaaacagagacacataggggagcggggccccaggagagcttgcagagtgcccacaaggccgaagcaccataagcaccatgcagatggataaatggcccggagctgaaacctgccccttaacagaggccctgacccagaggaggccctgacagctggctaggcttcagagacgcagtgacagggccggggaggtgtccagtgcccagagacagaggagaaggggtttgaagcacagagacagagggccggccattcacttgggccaccatgagggtgggggtcacgggggaagttgagccatgagcccctggagaaccagtcatgaaaggccagtttaaccatatttgatgagcaagggggaccccaggattatcctgaatggggttccattctgtattctgaatccaggccagtggagtcgggcatccagggatcaggcctgaggagggagccctaggaagcagccctgccagtcctgtctctggaaaatggccgaagcatgctggatgctgggccctgtctgacccctctcaccgggaaccttgggggccagatcacactcccagacggtgggaaagccaggcggagggacaggcctgctggggtgggctgcgtggcggtgcagataacaggcgccagctgaagccaccagggacagggcctcaggccttgctcttgggcaagctatagccaaatgatatgttggtgaatgcaaccggatgattccccgggtattgacaagactcccaagtgtgtgcctggctccgcagagctaatggagagcaggcattcagccgtctgcggagcagagctctgcctatggggccatttgtcatgcagctgccagagaggaagctggggccagggcctggctgtggcccctgtgtctctcccacactctcagatcttccgtgcaaggttttcactggaaagaagggttttgcagagtcaaacaggaggaagacgacccagtgcccgcggggctggtcccacagccttgcacggggttggtggccccttcctgccactccactctctgctggcccagaagctcaaggccattccctggcagtctttgctggatgggccacgagagctgctaataaggttgcttgttcagggcagggtggggagggcactggcaccagtggagccccacaggccgacaccaatttgattcagttgtgtgtaattcaaatgcttaaagaggagatttgctttttccagcatgggaactcctgccttcatcccaggctagccggcacccagaacccatcccagaccctgtacgtagcccccagatcactagctctgtctgctgtcacctgccggaggggtctgtgggtggcagaatgccaggaagcacgtcccctaccaggcctccacccacccttacttcctggctgcaggagaaacctgcaagcagcctggacctctgcgccctgccacggccacctcgaccctcacctgatgctgtggctccctctccagagccccccaccccaccccacactctttctggccacctgaccctacacagtcaacaacctcctcgagacactagtttcctaatgggagggaaattcaccagtgcaggagggacggcgaggagctaaagagaggaaaggaaaagtggaaagagagaaaaaggcgtgtggagagggtgcaacacgaggtggaaggagagagcccagcgctgggggtgggcgctggtgggcagcagggcaaagtcctgccagtcgaactcagcccaaagaccacagatggtcggcagtgaccgataccttccaccgggcttagctcactgctcatcttcctccactgcctctgcccatgttaggggggtctagtgggccacagtcagtgccacgtgaggagaagaaaaaggggtgaagcccaggaggctctctagtgggatagcccggccgatacgccaggcttggccatgcgaggtgagctgtcgcaggatgggctcggttacggccaggtgtgcaagcggacatgcgggtgggcgtgagggtgaacacacaggtggaagtgggctcaggctctgcctgcctccgtggcacctcaagtgagctgtgagaaacttctggaaaggaggtcttacctttcgagaggaatgctttccggaaccctccaggtctccgtccaggagcggcatggcgaaggagctcaggtcctagggtggacagagagcacgtggtcagtgacagtggccctcgggcccaggggctgcatggaactctacgtgggtgtcacctcccccttcctgagaccttatccttcaaatccaccatgaagaagggatgtggacgtgtttgctacacccagcccccaaagcccctgaccaccatgcacatccgcttccagaacgtgcagtcaaacttccaggagcagccatgacctcccaacaccccagggaaggaggaaagaagaaatggctgggactaaaggagtcaggaaggcaggcagaaagggtggagggaggagagcccgtctcaggctattctgctgatggacatgattttaccccacagcacggaacatgggtccagggacatgtgtctgcctaggaagatgatgggacagggatggggagggtgacactggggtggcggctgaggcaaaactattagcagagtctaatgacatcgtggccaaaacagagtctaaaatagatttggggaaagtagctcaccacacacttactgtgtctgaaacagccctgccccttcttcctcttgaatcttgcctccacaccaggcagaatcctgcccagtcatcctcaaatcgggcacagctgcatccctaacctttctttttcattttaaagtttttagttgtggtaaaatacacataacataaaatttgccatctcaaccattttaagtgtgcggtttggtggcatgaagcacattgacactgctgtgtagccgtcaccactgtcatctctagaacctttccatcttctcaaaccaaaacgctgttcccatcaaacactaactccccctccccctccccctagtgcttggcaaccaccctcctatctctttgaatctgaccactctaggtacctcatataagtagcatcaggcagtatttgtgactgtctgactccacttagcataatgtcttcaaggctcctccaggtggtagtgtgtgccacagttcccttccttttgaaggctgaataatattccattgtatgagtagaccacattccgcttacgcattcatcagttgatggacatttgggttgcttctaccttctgactattgtgaataacgctgctatgagtgttatggtatgaattgtgtctcccttcccaccaaaaaaaatctatatgttgaagtcctgccccccaggacctcagaatgtgactgtatttggagatagggtctttaagcaggcaattaatttaaaatgaggtcattaaggtgggccctagtccaatatgactggtgtccttcaaggaagagattaggacacaggcacctacaagacagagaccacacatagagacacagggagaagacagctaccaacccaaagagaggggccccagaaaaaccaaccctgctgatattttgatcttagacttctagcctccagaatcatgagaaaacatatttctgttgtttaagccaccccacttaatctgtagtgctttgctatggcagcctagcaaaccaatataataggtgtacgaatatctcttcaggaccctgctttcaattctttccagttatccccagaagtggaactgctggacatcaggtcatcctactgtcaattttttgaggagccactaaactgttttctgcagcagccaccccattttactttcccacccacagtacacagggtttcaatttctccacatcctcatcaacacttgttatctttggtctttgttttctgtgacagccatcttaagtgggcgtgagctggtatctcattgtggttttgatttgcatttcttggataattagtgatgttgaatatcttttcatctgcttatcggccacttgtctatcatctttggagaaatgtctattcaggccatttgtctgacttgtttggagaaatgtccattcaggccatttgtctatcttgtttggagaaatgtctattcaactcctttgcccattttttaattgggttgattgtggttgaattgtttatatattctggttattaaccccttatcagatacatgacttgcaaatattttcctccattctgtgggttgcctttttactctgctgtgtcctttgatgtacagaagtctttgatttatctaatttgccttttgttgcctgtgcttttggtgttgtattcaagaaatcactgccaaattcagtgtcatgaagcttttcccgtatgttttcttctaagagttttatattttatggttttagctcttatatttaggtctttgacctatgtaaatttttgtatatggtataaacgtaagggtgcaatttcattcttttacatgtagatagccagttttcccagcactatttgttgaaaagatggtcctttcccagttgaatagtcttggcatgactgtggaacgtcatttgactttatctctgagagtttatttctgggctctccattccattccattggtctatatgtctgtattttatggtagtattacactgttttgattattgtggccttatagtaagtttaaaattgggaaatgtgagacctccaactttgttcttctttttttcaagactattttccctatttagggtcccttaagattccacatgaattttaggatagactaattgttctgtttttggaaaaaaatgccactgggattttgatagggattgcactgaatctatagaccactttgggtagtcctgacctcttaacaatatcgcctcccaatccataaacataggatgtgttttcatttatttgcgtgtcttctttcatttccacctttcatttccttctgtagtgttctgtgcacttaacctttctttaacccattcccttctctccacgtccttgccctgggggtccaggcctacacccactctcacccagttccctcttgggccacctaattattgtccaaattgttcagccttccctgtttggatctgtgctccaagtctctgcttaaagagcaacccctgaaagggtgagcctcatcacgtcagccccctgctaaggccccagccactcgtaccgtcacctcagcaatggcttccaggcctggctgactgagacacgccagtgagatctcagatgtgcagattccagactcagcctttctggtggtgtttatctccaaagttctcagccctggctgcacactgacatcacctggggagcatgggtagagtgcactggcctgcggtacagcgagggcatttggaaattccaccacagaccagatggagagctgcgtgcctcccaaggaggagtctcaggagtctcagacacagtcaggagctcccagccggccctgcaggctgcaacccaagccccatagatgaactgacctccgcagccttatttctgatgttctctgttccggtctcctcctttcagcaacagcccaggcagagggtttgtcattttccaaacacagctatgcatccatggacatcccacctggaatgctgtcttaactcctcagacacttctgttcatggctaccatccacccctcctgtgaactgctctcattttgcttcagccactcagggacagctccagggtcccatccccagcccccagcatgaagcccggcccatagcaatgcaggaatcaccctggtgccattcaccaaacaccccaagccctttccttcctctgagctctctttccttcctcttgctcttcctgctccgtgtccccaaatcctggctcacagagtaaactcctatgtgtcctgcaaagcccaagtcaaacacactctctggctgagagtcaccctcagacagaattaattatctcttattaattatcctagactgtgtcccacagtactttagatacacctttattaccagactgataatcccgtattatactcatctatcagtttatttctctaactagactttgaatccatccctggcaagaggaaagctacccacctctctattcttggcctcatactgtacccggcaggcagcaggttccagatgtgtttgaattaactccccgaccaagcaccctcttgcgcctgcagcaagcatggggccgcagagtctgtgccgctgggccagtgaaccatcaggccacacgcagttgcaattcactaggaagtgacgagggaccagggtgggtctcttatcgcccattttaatgagcacattcctctctggtttcaaattctcattaccctctaacatttgttcagcaccagcagtttccacatgcagaagctttttcacaaatcctcacttgctcctcatgcaaccctaagcagcatcctgctctaacaactgaggccgaggaggttcaaagggactcacgtcaagatggtgtaaaagagctgagggccggatgtgaggcctgctgctagctcaggctgcccgtggaccccaggcggctgcccggagtggtggaggcaggtcccacgcaggtgtctcgggctggagtgagtatgaaagcatcaagtcaagcccaacatcgtggcctgctgcgtggctgctggactcaggtgtgtgtgcctgcctggtcatgcagcccaacagggaagtcccctggcacagatggcaggctttgctggaaggctccccacccccaatcccacctcccagcaagtcccagtattctaatcttggctctcatctccagagctcaccaggaaacatcacgcatcttggggccggtgtgggaaaatctctaactgcaactatggcaactagagtcttggcttgtagaatacttaggacctggtgtctcgggtgacatgccagaaggcccaggctcctggatgtgccccattcccgtgatttctaaatttaaaactcctgccagagctttgggccttccccaccactggtctctactcccagtccagtccctcacttcctcttcccgtctgccggccactcaggccctcacaggactgggaggacatttagggggcaacgctgaggcaccaagagatgctgaagccctgatttccgccaagagacagctttagcactctgattttcatccgctgcacaaaatgtaagtcagaccttgaccacatgtgttggagataaaaaggtgaattttcaggatttggactgataaagtcacctgtcagaaaagcatcaggaccaaagagaaaagccctaaatctgagagaattcctgagatgtaagctgaccttaaaagcaactcattcatccatctcgctgccttagaaatccaggcaaaagccaaaagtctatcacaaaaaaagtgaagtattaacgacagagccaacattaatctgacattagtatgtccttctgaaatctcccaactgttgcctcatttggtccttacagcaacccacacaagtaggaaagacaagtggtatcatccccgactatagatgaagatactgagggtcagagaggttaagtcatttgcccaatgccagagaatcagacagtagcaagcatgtcctgtaaccaggtccacctgctcctagctcagaactctttctatgaaactttaccacctccttggagtggttcagttccagtaatagaaaaacaatttggtatcagaggctataaaaagagagcttttcttcctaaaacaagtatccttggcacagtgtgacctcaggggaaggaaggaaggatacataaggatttgtatagtcctgtgattcattccccaggcaacttaccatactaactttctcttcaagttcttcttaactaaaagtaactcaagctggtgttgcaaggaacaggaaagtctaaaaaatcccaccaccaaatgcaatcacttcacattcttgcactatccacatttggagtcacatacagctcctcctgcccccggcccgctacttatcccaatatttccccataggataatagactttctaatgtttgcaatcaactaatttgtgtattcttgaaggatgggggcagttttactcacatcttagccctgacagcaggtgctaagtgtatatcgatcagatgcagttccgaccttccagcgtttctgatgttttgtcttacagagctcctttgttgatgcagctgggataccccagaaagaagacagacaagagtgcaaatacaggacaaatagaaaggctgccagtagcaggggcccacgatggcccccacctcagggcaaactcgaggtttacaatatcagggtcacgatacaacattcctgtttgattccaaccgaggaagcaacacatcgagaatgatttgcattctccgctcctgctgagcggaccccagcacagagagcaccatctggagctgctgggccttgcgtccgccgaggccagggcccctcccggccatattcaagcccccgtgtccctcaggcccacaagaacacagcctgcagcagggagggagccgggggctgagccggagccccagctctgtgatctgcgatctggggaatcttggacatatccggacttcagtttttcatctgtcaaatgagagggttgaactagagaacctgtgaagatgccttgtagctcgcacgttctctgtttttacccactgaagcggacaacaataggcgagatcaggaacattgtaaaggactcccattagactcagaataagatgcatgttctcatctcctatcttcatcatcaaaataatttcctcctactctcaaacgaccaaagactctccactgctctcagagccacagggtgtttggacggagtctcggggcgtgcaccgccggggaaggaaggagcttcctctgccttcacaacgctatctaggtgagacggccaggacccagcagcatttctgcctttccatcttaacctgtgtcttgatacgcttcttaggttctaacccttaaggtttctcaactgattgttcagctccctcaatcctaagggcctgggctgtgggatccagcaccaggcgggttctatcagacgcccagtgaccccgggaaagctgcgtgtggcatctccagctacaggcccgaggcccgcggttcccacctggaccccgtcctgcccaccttgcctgccctcagtcactgcccggggagtggctcataggttctgaccacggctgagtggtgactgtggcctggatctcgccccaagtggtgacggccttggcaggcccctctgctgggaggcacgggggaggtgcctctggacaggccggccttgcgcaatccccaaaaccaccaaacgggcaattcttggtactgatgggcggcaggaggtgaccagagccaggtcaattggagcctttgaaaaacattcatgttatataaccactctcagaaaaataaggaacaaatattgaatcactggaaccaggcagcaggggagggccagtggccaaatccgggaaggcctaagctccactctcagagaagttccagagccatttactttccacagaggacaccgtagtttctcactacagcctaagcaacttcctgatgtcaaaagaaacatccaactgtttttcactcctatggccacccttcctccctggctccctcacctggtggtcctggttcccacaaccgcctcggggctccccttccccgccccccaaggccaaggaccctggcctggcagcctgagcctcccctggctttgaggaagtcccctgctccaccgtattcccagttcctcgtctggcccgaggccacccggggcttccctagctccatatcagcaccagacatgaaactctttttgctcaaaaccaagtagctgcagaatccctggcccggagtgcccaggagacctcgaccctccccgcagttctgcattcacgtcttatgtggagcacgccctttaaaatccaggaacctccactttccagtgtgtaaaaggaggccatcatccttcttatcacgggctggtgggaaacgagaccagaggacgtcatcaaaggcccttcccgcggtgtgagcccccgtggcactgggcatggcgagggccgctggccgagggcacactggggcctgatgatgaaggctgtggggagcaacaaaggcatcatcaccagggcagccaggcccctcatgcggctcccgcggaagccagggcagttgctcacactcaaccaaggcctgagatcgggtttcagaggcttctgcaaagacactggctgtcccccttataattagagagctgtctttatcccgttcccaaggtgaaagccaagatgattcatgacttgtgcacggcagttctaaagaggatcacagcatggccgctgccagagtctccggctctgtcctcgtgcaaagggcagccgagcctttccttgcccactccgggcagcctttacttgaccagagctccatggaagcttggagggaccccactggcctcctcacgttgtggtggaggatgctctgcaggggccaacagtgcctcttctgaccagctgggggtggccatcctgaccgtcctgacctcaggggcttgtgctgtgggattcctgagagccccttcctagttcagggccccagggcagcctcttacaggcagctgctcccaggccaggttgagtccagcctctgctcatcacacatgcttgtcttcttccagcctgtctgagatcccccagaaggagggagagtggggggcaggggcagcacctagagggacaggttgggtggaggctacaggagtctgggtcagctcccagttcatgaggaaggaggcaagtacctgggaggccccgggacatgcaggttggggggcgcatttgcatggtctgtgcagccgtctcctcgaggaccagcagcaggcagcctcccagctcccttccaagggtgtggcctgggctgcaggttgccgcctccatccggagtagctgcggtcttcacaggtggcactgcgggccccagccagggggcaggggaggggatgttatgggacagggagcgctgggctccactgaccacatcccatcgtggagtcagtaacggttaatttgatgtgtcagcctggcgaggccatagcacccactgattcaatcaaataccaagcaggtggctgccgtgggcgtatttgcagacgtggatgacatctacagtcagtgacttgaagtgaagcagatcatgctgaatgatgtgggtgggcctcccccaatccgcagcaggcctgaagagggaaaacagagggttctggaaggggaaattctgcttcatgattgcagcatcgactgcctgagcttctagtccgtctgcccagtggattcgggactttccagttccgaccaacgcatgagtcaattctttcaaacaaatctcatatatatatatatatatatatatatatatatatatatatatatcacgataatatgtatatgtaatcatgttatatacattatatagagttaatatattatgtgattatatctcaatatacatattaagaaaaatatgtatattaaggagatataatcacataatatattaacttaatatattttcttagtatacatatattaagaaaaataggagatctatatgcttggatctctagtcttggttctccttctctgcagacccctcctaacacagagccctaggccccctcacccgagctggtggggacagacatggggagagtccagggtaaaagcaggccgctgtttggaagctctcagccttcgctgcatagacggatgggtctgctcagtcatcgggtgggctctccgcccacactgtggctctctgtccacactatggaaccctcactttgcccagggcccagtgagacacccacaggccccagctggacgagaggacaaagacggatgtgaagggccgttgtcctggcagtgcttagagaacaacaggaaatggccaaatgtcctcctttgactgtcagggaacattcacagtacgtgaagggcaatcacaggtttagaaaagcaccacgatcacctcctagcctcgtctctgagccttggcagcagagtggggcaatcctcttgccttcgcacgctgggtaacagtcgtgcaagtgtctgtcatggcatcttgtcaccctgtcctgtcactgagggcctgtctcctgccacacccagttggagctcggcaaggaccgcgtctttttcacccctgagtcaccggctcctcccagggctggattccatgagcctctgtccttccccttcgcagagctgacacggggagagtggtcataagctggggcgtaaatgactgaggacggcccgggggccagtaaacaccaagacctcgggataagggaatgacatcctgatgcgccacctccagcccctgtacggagggaacagcccttcatttctaggactgtcttcagctctgacattatgattctaccaagacagggtgtgaaaaggccagctctggggttctggggaggttttattggctcgcaaataaaatgccaaaccaccagccaataccagcatagagccctccgtgggcactaccgactcaagggaaaggccccgaggccccacacccggcccggccagccagctgcagacacaccctccagtcatcggccacccagacttcagagaggaaaaaaccagccacgaggtgaaagtgagatggccccggcctgacctctgctgcagaggcccaaatggccctggtcagatctgacgcttcccccacagtcagcttcttgccaccccccccaccccccaccgccgcctggtgctccccaccgggtacacacccagcggttttggttagtgcttgaagacaaactgcaggagggacaccatgaactacaataaaattgggcaccctggggacatttttgtaaggtcaccgagttgctggctggctctgagacacaccctcctctacgtagaggaccttgtgtgagagaggacacctctgaacgagggctcagagacctcatttctgctcccaaacagctacccaagatgtggctttgggctttggcccagagctgaggcctgcaaaggctgccacctcagtgcttccagaatctcaactgtccatatttacagagccatacatcaaaagattcttccccaacactttctacgggtacccaaggactccttctactccatcttgtttcacccacctgctctgtgccaggcacattatagatcaaaaggtacagggagttcagaggaaggaggaaataccatggacttaaaaagcaagccagggcttcccaagccaagcatagtgaatagaggagctttcatttgtctcctcacttccatcccggggtgagccggccactcccgcagcatctggccacggctcttcacactgacagtcccaacttgtcagtggattatgaaatcaatttagtggattgcacaaccaccaaaaactgaattacaataagaatgtatctcatggttgcatgaagcctgtgtctcaatgattcacacacacatagaataaaatgtactttgtttgtttgtttgttttttcccctgagacagagtcttgctctgtcatccaggctggaatgcaatggcacaatctcggctcactgcaacctccgcctcctgggttcaagtgattctcctgcctcagcctctgagtagctgagattacaggcgcccgccaccacgcctggctaatttttgtatatttagtagagatggggtttcaccatgttggccaggctggtctcaaactcctgacctcatgatccacctactttggcctcccaaagtgttgtgattagaggtgtgagctaccgtgtccggcctgtttttttgtttgttcgttttttgttttttgagatggagtctcactctgtcgcccaggctggagtgtagtagcgcaatcttggctcacttcaacctccgcctcccgggttcaagcgattctcatgcctcagtctcccaagtagctgggattacaggtgtgagccaccacgcccggctaatttttctatttttagtagagatggcgttttcccatgttgtccaggctggtcttgaactcctgggctcaagggatatacctgccttggcctcccagagtgttgagattacaggcatgagccgctgtacccagcctgaataaaatgtacttcctattgtgttgtgggtgaaaaagtctgaaaaattctgcattagataagctttgaaatcatgcaggtagatttcagggaacagagaagagctgaccttctgtccccgaggtgtcaccagaagtgtggagcaaggggtaccatctgtcctcctctcctggctgaagccctctgacccctctccgtactttatgcccagaaatacacatggagttaagaacacagaacatcacatctctttattaccacaagggtgtggtgattccctccctcctcacctctcaccaccacccccatctgctcctcccctggccctttgacatgcagggtagcttggcctcatccccaggccaccgctagacccagaacagcaattacacctttggggacaaccaccagccccagccccctgccgagcggtgcctgtcagcttctgttcccaactggcccgggcctgctgcgggtgccctcacctctagcgcctaaacccagagaactgggcagtcacagggtgttaggatggaaatggcctcagaaattctccaaggcccttctgttacaggtggggtaacagatgtccagagattcaagcaagttgctcagagccacatggtagagccgtgactcagccagaaccaaatcctggtcttgcaacttctaaccaaggtcccttttgatcatgtcatgctcttatagctgcttctgactttctagcttgtgtttccactacataagctggtaacagtaactcttacaggattgcaacgggctggccatccctcgcacgggcctggctatactgggcacatagcaaatgttctaattctatgaagccacttgggttctgcgggcacctttgcatcttgtctccagcgacagcacaaagcccgtgctccaactccctttctggtgtcatttattgtacatgaatctgtgacttccccagagcccttcagtctgtgatcccagccacgcaggcggcagccgctccaggaacttcccaggaaccatggaacctgtcgtgtcctccagactgacgggcgcggacactctgcatggaggggctccagatgccaccggccagcatctagcatctagccagcagcgatgcataaagaccagccaggtcaggagaaggtgtctgctactccccattccaggccacaccgccagggccacgctgcaggcagctaccagataggacatgaaggtgcctgggaggtatgccgccccctccagaacctcacaccggccaaaatccctcacgggtgggctaacaacactcacaacaaccacactgctagctcttttaaaattttactttttagtctttttataagtttaattcttgtttaaaaagataaattgaacctctaccccctcagtgaggcaggcctggatctagatttctgcctaaccagctgtgtcatttgaaagtcgcctcacgggccgggtgcggtggctcatgcctgtaatcccagcactttgggaggccgaggtgggcggatcatgaggtcaggagatcgagaccatcctggctaacatggtgaaaccctgtctctactaaaaaatacaaaaaattagccaggtgtggtggcgggcacctgtagtccaagctactcgggaggctgaggcaggagaatggcgtgaacccgggaggcggagcttgcagtgagctgagatcacgccactgcactccagcctgggcgacagagcgagactctgtctcaaaaaaaaaaaaaaaaagaaagtcgcctcccatctctggtcgtcagtttcctcctctgagacaggaggtgtctagactcaacccctccagctcctccaaggccttcccaaaacaaattctgttccaggccatcccacctcccagcaccgcaatgacactcctccttcgaacacatccaggtgggccccagggccacgctggtcactgccacctggtgggtacagcctgtgttcaggccccaaggcatgagcagttccaggacagaggcaggacaaccaccaaaggatgtgatggcagccagggcttgggtgagggagggagggaagggcaggtggtgcacaggggatttctagggcggtggaaccgctctgcatgagagtgtaatagtggacacacaacatcacacacacgacatcacacatttgtcaaaacccacagaatgtacaccaccaagagtgagccctaatgtcagctatggacttcggttaacaataaggtatcaacagaagctcaatggtaacagaggtgccacagtaatgccagacgcagacaacaggggagattggcatgggggctgcagggtcagggaggggcagatgggcaccctctgaactttccgcttcaggttctgtaaacctaaaactgctcacaagtaaaatccactaaatttttaaaaagcaatagcagcaaatggccagagatggcctcaatttcatctgccaaacaactgcccatcacgccaggcctggaccacccacccagctcctcagagatgctggaggtcataggttccccaggaaatgggaactggagaggtcaattcttcctgtatccacggctccaggtccttctagaacacagagaaaggtgcatgccatgctcccaggctcagggtcagaagattagtgggatccagtctgaggctcagcgctcagaccaagaagataaatgagaccagagacactcagagattaaataccttgctggggctgggcagcaaggaagctgggagaagggtctgagaacccaggtccccatctctcaggcccaggcccttggcccccaggctggggcaatgaggaccaagtacagagggctccagatggaggccagggaccagctgcaggcaccaggcagcctcagaatgtctggagctgggggacccctcacagggctcgctgggcagctggttcatcggggagactacgtggtgcagaaaagcttgagtttcttggttggggactcaaggctgcaaaccacggcgctaatgaacctaaacaagggaatttgctaggttttcttatttttggtgttttgttgccaacaaactcattctgttctagaggggcttgttatataaggaggagagggaagaaaactgctgagatgtgaggccaaagtcaccagaggaggagagacttccagatcagctgctgcgccagctgggagtcaggtacaaaaaacagggggttgtttgcgtctttgttttttcaaacaagaaaaagcaaaaagcctgcatcgcatgtcctaggaatggggttaaaagtcgtcgtctcttgggacagagtttggacgcctctgtgagcagggcctggtcactgaggtgtccctgactcgtgtcctgtgtgcaggatggagtctccatgcagcccaagcctctctgcagggcctggtggctgctgagaggcagaaggaaacccctccctgagtgtggcctctgcgtgtgtcacctacacctgtcagaagggtttgggatctttctttctcatggagaaagtgcagaagattctgggtcaggccctgtgggacatccctagagccagaggaccgtcccctttgtgtagtttgtccctggcattgccagtgcttctggtttcactcttggttctcagcagtggatcctagaagccccctggatcatgaacttctgccctttgcactcatgaggcccagggacacctccctctgcttgtgcaacacgaggctgccacgtctcaggtcttcgtgcccaaagtgagtggactctgaccttccaggatggccgagggtgccaacgtttcccaaagatctgttttcagactaatctgggagacagcctttggagaggtccgtgaagaagaaaggggaactccacaggtggaggggaaaccgaagctacctgagggatactccccacggcccacctggccccctcttagtctgcactgccctattttcatggcttaaagggcagaatcaaaagatcacagtaggtcagttctccccaggctatctgtgtgcccagcctagagaaaggaatgaacattgaacagggacctgctggctgaaaccttcagtggttgcttcctgcctgcagaaggtgtcggactctgcctggcattcagtgcaccccaggacacagccctggcctcagcctctcctttctcccacaccgctcttctgcagcagccacctgacctacacgctgtcctgggacaccctctactcctctttaatccccccgtgccagcattcctcaaaaaagggggctcaggactcccacaaggttaaagttatcatagacatatatatgatatatatataagcaatatgatatatatatatatttttttttttttgagacagggtctcgctctgttgctcaggctggagcgcagtggtgtgatctcagctcactgcaaccttcacctcctgggttcaagtgattctcctgcctcagcctccagagtagctgggattacaggtatgtaccaccatgcccagctaatttttgtatttttagtagagatggggtttcaccatgttggccaggttggtctcgaactcctgacctcaagggatctgcctgcctcagccttccaaagttctgggattatggatgtgagccactgtgcctgacctagataagtgattttaaaggtaatagctggggagccggaattccttgattctgatgatttgcgattaaaacactttgtataggaatttaaggcgatctttatcatattggggttcaaggacagccatcagtaagaaattttctcccttcaaagggaggcttgttacaaaatttgagcagcagtggctcacaccattccttcctacctcgagtgtcctgaccctttttctctcacccatttatatcctactcattcttcaaaaactagctgattcccacaaatttacaccaacttttctgagcagtccagttgaaaatgatatcctactccattgcattttaatgcctaagaatttaaaatcagtcacgtattacccatttgctatttacatataaattgtatctctgtatagattgtgaggactctgagagcaacggctatattatccagcttgtttttttttttttaagaagtaaattcatccagcttggccaacatggtgaaatcccatctctactaaatatacaaaaattagctgggcatggtggtgggcgcctatagtcccagcaactcaggaggctgaggcaggagaatcatttgaacctgggaggcagaggttgcagtgagttgagatcgcgccactgcactccagactgggcagcagtgcgagactatgtctcaaaaaaaaaaaaaaaaaaagtaaattaataggattcaaaagtcaaaacataacaacctgtaattgaagagtcatacccttggcccagccatgccatgtccccagaggaaccacttttagttgcgtagacagctagggttgctttatgcaaatgcaaatatgaaggctgttccctgtctcttatctgttttgctcgtgtcttactgcctcgcctatctgggagatctttcaatatcagcacgtagggatttgggggtatccacgtcatatgcttttgtctggaatgctctagtttaaccagtcccctgtaggtgacgcaggctgctttcaatctttggcaattacagagaattaatacaataaaaacttggtccatacttcatatttccagcataagttcccagaagtgtggctgctgcttgcaggtcagtgcatttattatttctgccacgtgcagacagggggaagggccccttataaaaccaacagatctcgtgagaactcactatcacagaacagcatgggggaaaccacccccatgattgaattacctccacctgctctctcccttgacatgtgggaattacaattcaagaggagatttgggtggggacacggatgtcaccacgagccctcctcagcattggacagtttgctctcctaactatgatgtaggagagtctatttcccgcactgactcaccaacaggctattttgttcaacacctggacttttgctgggttggtaagacgtggcatctgtgtaacccaaattgacatttgttttctttattccgtggtgttccatcgcggcacagagtcggcacttgaggtggcatcctgtggaactgcttctcaaactgcacgtaggacataggtcataaaatccactcaggacacacaggttttgttgcggctgctgttcatagaacaaaaccagagctccaggagttttctgggatgtctatatccaataggtcatgatgtgaagttcctcgccgtggctcactgtcaaagtctgaaagccgctgcggaagtggctcaacgcatggcaggcacaggggctccatggggtaagtagcccacaggacagccactaggaatgtggtccctccctgcatacatgtgctgtctcctgttgagtgggcgaatctgttcctccatccttgagttggggcagctgtgctcaacagaaatgcagcagaaaccacaccacctgacttctgggttaggtgagaaggaacctcgcagttcctcctggatctcttgtaatgtctgccgcgggtgaaaccagctgccacgttaggaatctgcaccaagaccaccatgttatgaggaagctcaagccagccacgtggagaggctgcacggatggagaaacagctgcacggccagccccagggagtgatgtgagagtgaaggagcctctaggatgtgccaggctcagctgccacctgacttttcaaataggaggaacccccagtgagaactcagctgagccagatgactcctaaatccatgaaagatgatttcaaatcatatttttaagttttggggtggtttgttatgtagcaataggtgatcttgtgactatgtaaccctgggaaagttacttcatttctctgttttttaatctaaaaactgggaatcatgggagttcctactggaaaatgagttaacatatagaagtatagaaccacatatgagttaacaaagacatggctgtgatgcctgggactcatttggaaaacatgagttatcactttaaaatgcttcactgagtttagaggcaatatactatgattactgaacccagggacactacagattcttccttctcagagctttgatgagaggaaagaggcagattccaccttaccttcaggtttgccaagatccttccccaacgtacaagtgaaagggagctcaggaaggcagaatgaagggacacatcaaatccttggtgacaaagtttaggacaggctgggcacagtggctcacgcctatagtccaagcattttgggaggccaaggcaggctgatcacctgaggtcaggagttctagaccagcctggccaaacctgtctctactaaaaatacaaaaattagctgggcgtggtggtggccgcctgtagtcccagctactcaggaggctgaagcaggagaatcgcttgaacccgggaagcggaggttgcagtgagccaggatcccaccactgcaccccagcttgggcgacagagcgagactccgtctcaacaactatgacaacaacaaacagtttgggacagagaaaaatccctgtaaacttcaagccttttggggtgctcttgggtgaactcctaaattgctcaagggctaacttcctcatttattattaaaagaaaaaagaaaaaggcagaggccagtggtgaaggctggcgatttctggtctagggtgagagataacagaaagtaacaatggaggctctcgcagtgctcgcaggcactcaaggaacggaaaggaaattgcacatttcacccgtgactgcataggcaaacgagaacagcaagtctctgctttcagctggaatgttatcaacttcggtcacgctgattatctcaggctgatcaggaaggctggtaccaggagtgagtgactaaatgaagaaattactaattaacaaatgcttgggtggacaatccttcaaaatttaggatcaatgggaggagacagaaggagtcttgggaggatttttaaaatatgccagagctggctgggtacagtggctcacacctgtaacctgaggactttgaggtggagacgggcagaccacctgagctcaggagctcaagaccagcctgggcaacatggcaaaaccctgtctctactaacactataaaaagttagctgggcgtgttggtgcatgctgtagtcccagctactcaggaggctgagccacgagaatcgcttgaacctgggagatggaggttgaagtgagccaagatcgcaccattgcactccagcctggggaaaaaaaaaagccaggcctcctaatgtactcatttaaacatcacttgtgtccacctgggttcagaattgcgctggacatgggatacacaaaggtaagacatggacccaccctcaagtctgaaggtggaggtggggaagggcagaggctgtaaagggtcagagggaccttgtggagtggtggaaatgttccagatcacactgtggcggtggtcacatgactgtgcacacttacgacaacccatctaattgtatactgtcagtcaaagggcattatatgtaaatcacacctcaataaagctgaccaaaaagtggccagtcagccaccagcagacccatgggataggggaagaaaaacaagcaatctacagaacgtgggaaaatgcctatattaagaatcctggaatactccatgtgctttttcatgcagcgggagtggaattttcaggaagcagctgtgctgtgggtgacggtcatactttattctctaaaactctccagtttcaattggcctcttggtgccaaagcaccatggcgtgttacacctatcagatcgggcacactgccccttcttcccaacctacgagctgaaatggccagcactgcgccttccagaacccagcgtagatgcacagctgccacggaggtaggaagaatgattcgtttgccaccaaaagcccagtttctccaacaggtaagtcccagcagggtgcgatgtcccaaacctacacaaccgtttccactgcctattcccgggcccctcacttgggtcaaggcagcatttcagaggaagccaggagcgagaactcgtgcatccgaacccttctctgacttggcgggttattggattagctactctcagaagacccaaaaggcataggggagagaagagataaatctggatgcggtggagacaacggccaaacagaaaaaccgcttggagaataaaagtcgggggaagcctgtagtggggacgctagactcaagggaaggctctggaggaaggaagaggctaaaggcatagtttcgtaacccctccctacaaactaccccctttccctctgcccaagtgagcacagggaccgccccgcagcaagacgacggcagatatttaaaatgtgaggaaccccggccacagcgggcggggctccccacccatcacctagtgtcctcactcactgcactccagactttgtcaaagtggtggcagctgagtccagcaccagagattggtgatgctcgggttgatttcattgtcaagtgcatctggcaggactctagtttgtcgacagtattccagacaaggtgtagctggctgaaccgcagtgcctcggcatttgggaccattgaaaaatactctggattctttttttttcttttgcaattgcacaaggatttacttatctctcttcatgggtgaaactgatttggggggaaactgctagactcaatgaccagttggactgtaggcaagaaggcccatgattttgttcctcagataaaagagcagcagggaaacaggaggcctctctcctgcaaagctggtccaaagtgcacacaaggcatggctgagcgcctggtgatgcacagtcagcagacgggcgagacccaggaacgtgtactgtaacaagagagtctagtgcaggttgttgggggggcttgaggctatccgctgacatcttttctccccagtcaggagacagtaggggagatggttctcatagatcaagtcgggctttgagaaggaaggtgaacaggagaaaaaaaaaaatagaggcctcagaaagcccctccctcccaagtctctcctcacaggcgaaccacgacagatggctgcgcggcctgagggccggcctccaggcagccagggaggagcagctgcaagtcctgcagtctgtgagacccccgaagggtctgggccagcatccaaggctaaagccttggctatcctaacgccgcagtggggcacttaaagctcctcacgcccaagcccaggcctggtgggagcacggttctctcccgcgctccccctcctccccactccacggccacccttccttccaatcgtccccctggagttcgtgttggaagatgccagtgagcacgtctcagggctctacgccttgcacggatgagtatggggtgactcagagggaaggggtggtggcagatgcctgcagctggctcccagccaggtttggccatcctgcgtaaatgcctgccttgggtcttggcctaatactaagggcaaatcccaagaggggtgagtgggcttctggaatctgagcaattctgctttcaaaacaggtgaatccctaggccagcccggccccttcccacacacccctaccccgagacgggtgcagaatcagcagcggggatcatccagagactctcgcagtccacggcaggtgtcggagtgggcctcattccagagttgtggtggccgctccacctggcgagcttcgaggggactccggcaggcgctcgctgtggggtcctcccaccagtcttctcagcacaggaacggtgccttcacattggtcttccggggcttaaaagcatatcattcctgcttgctcttcagatgcaaactccccctccaaggatacctccaggttccctgccagctcacttgactcacatggcaatggtcaccgggctgcctgagcccaaatcaagcaccgtttattagggggaagctccgttatccagaaagctcatctttgaagagctacccatttcctgccaaagttgtggcgggaaggccttaggtactagaaaaccttggggaatggcaattaaaggattatcattcttacttatttgtttggataagcagcaatcacccttcggatgcttattggtgagaatatttctaaaagtgtcctgcacatttccctgctttgatgaatggaacggcagggcaggatttaactgtctgatggctacggttttgggaaagtgccagaacctccacgtcagccaccccagagccacaggcagggtatgagccacagcaatgggccccaagaaagagccccacacccaccatggtccacggaagacgctgcttactggccccgggttacctggagtcatgtgcattctccttacatcaagtgaagataatattttgtttccttcccactttttctctaacacaagccaccccagttctcccttctgacaacaggcaagtggaccctagtagaccttccagaaaagccttagagagcacccccaaatgctcacatttgtcagctgtaattccaccctcagttaaaacctgattctcaatgtgacttggccaacgcagcttgcaaagcaagaacgtcttcatctaaggttgaaaacatcagttgtttgggttgtgagaaaagaaaagcccacaaggtttccgaggcttggtgctgtttctcactgtcctcagctcctgattctgcagctggttctctctccaagcactagcaaaaccctgccctaggagcccccagactctgagagcccatgaccaaaaagaaaaggaaagccaagttggggaagaacaggggcccccaactccacagccctccactctgcccagagggcccaccctgggctgcctggaaccccctaaagttgccacccccgcaacacagtagtggggcagttcctggcagcgcctgcagcccatgggctggctctgtacccgcagccccgccaagcgtctgttatcttatttactggaatctgcacagccaggctctagctcaccggtgactaaggagctgcagccattattaccaggcagatggcagactccctaaaagcagacattaaacaataaaatgccaccacataccttgcccacaaaataaaatcaaaacaaacacctaagtctggctttgcttttcttctgctctctccctacctcccctgggtcagagcacagggggagaggtgcacggggcaccgagaaggaaatttacgatcgaggaagaccatacggacatgcccagtgaccttcagaaggtggcagtagcagaaccaccatgggaccccaggtggcggagagggcagaccctgtccatgtgtgacaggtggggcagaaccaccagctaggacaggtgggattggaagaacaaaggaacgacagggaccctgcagaacccacagccctctcgcctcagtcgcctgatgaatagtcaaagtgctaagacctggagaattccatcaaaaactcagttgctcccactgctttggaaggtgttctgctgggctctgccaggacaggccacggctgacggctcacctgaagagagggacctgctatttatgaagcatctattatgtgctggcagctgccccttactcctgcaaggcaggtactgtctccattcttagaagaaaaatcaggctcaggagaaggaaataatttgcccgtggtagccagggggtgaacagcagaatgctctgccaggcccaggccacgaggcctctggggtgaagaaggaacaccccccagttcttgggcatcaggtgcttgtgattccattctatttttctcttaactcataattcagtaattgaggctagagctttgccatctcacattaaacccttttaggactccagggccttaactcacacttgtgggaaggatgtttggttcaggccaatgaaaggcttggctggaaagcccacaaagctgacaggtgtgcagggctgatgacaggtcagtgcactgtcccactggtgccgggctgctgaggcttcaggacaagcctgcccactaggaagggagggaaggtattgagccttgaacgagccacttacctgtaggtccaacctaggtttcctgctacgtcaccagcccccaacaagagctaaaggtaggttttcactaccggacattcaccatgtggctcataagtacagttggagggacaactttggagttgtccgagggcccgagtttgagctctagtttgccatttactggttatgcaatctcagtaaattattcaaattcatggagcctcaatttccttgtgtaaaagggaaatctcccaggatcatcatgaaaattataataattaacattcatgaaactgccacacatggtgccagatgcctaataatcaatcaatcaatatttaccaaaatatgcaatacagacagctaacagcagtgtaagaggtaacgtagagacagatccttctaagaaattaagacccctacctgactgcattaggagtcatcaattgaatctaccgacaagaattgaacacaatttaatacaaagtaatgcataaaacaaaagtacaggcattcaccttcattaggcctgggctgagtctgagaggaggtaagggggtttgttagaagggggtgtggtgagactggtctgtggggcatctctggggaggagagacctgaatacttttaaaggaagaaaaagatctatagtttgaaagagcgctgtgaaggagttggataaatccaagatggattccattagttaacagctgagctgaaagaagaacacaaaattagaagccgcagttccagggacccctggttatccaacactatgaagtgaggaggtcaagaccaagcatcttcctcttgttggaaaggccaatgcctgggacacaggactcaagagtttgttttgctaaagtgctgatgtttaatttcaccctgggacaggacctgaagagaagccagagctgggtaacaaacacgaagaccaggcttagggactgggtccacccaacctcagtccaccagcctccgttcccctccaccacccaccccactcccagcttcaaaagaacaggctggaccgcaggacacctggcttctctttccagctgaatccctttgtgactttaggcaaagaagattaaatattttagattttcaattatgttcactgaatttaaccactgaaccctcagtttcctcattataagcgtgtgtctctcaaggcctactactgctgggctgaaaaaaaaaaaaccacacacacacacctgagatttatctagtccttggaagtttccatgcaagttggggaagcagctggaaggtgagaaacccccagacctaagaggcccacagtgaggcccctcgggtgagtcggagcctgcccagggtgtgtggagccccagggtgccggctcactctgactgcgtcccagggagcttccccctctcacttactctcaactattcacacctagcagtccccgaattctcgatttatgttttggggcctcctgcctgcatcctggttgtatccctaggcctctccccatcttccaacacctacaatccgtaacgccatcaacgctggattccctgctagcccagccttcttcaattgtttactatcacctttgctctccacctgggttgaaaattcagatgcacagaatcaagcctccccccaggaggggggtcaagcgacccccaggtcactcctaatcaccagcactcaaggaccccgaatcacagacttgaagcagacagacagcctctggcttacggaaggcgattgtaaggaaaaaaaaaaaaaaggacatggcttactcaaagtgccatgcatcaatgtcacagaagggcgacaagagggatgctgggtgagctccgaatctagtactttccagcctgcagctctacttgttgctgcaaattcactcaacagtcagggcttctggttctcagcctccccctcctcctctccaccagacagcggtgacagcccacggttcagccactgaggaggccatctacgatcttctcttccttcccttcctctctcccccactcccctcccatctgctgcttctttggattccccacaacttcagcaagcaagtaagcgttgggctccacgctccgcaggaggccaagatacccttcaatgtatatggggtcaagagagtccccagaaaactgtgggccatccccaaagcccccacatcatccccagtcttttctgtttgggccaaaggtaataagtgatgactcaggaagggcaaggccaggcaaagaatgacaacttcgctaagatttcagctccagtaagggaagttcaagccagggtgggaaggcagggaggagaccctgtacccaggacccagtgtgtgaggcagctctgctcagcctggcaggggaggagagacagactcagagaggaatggagctgaacacgcccacacacataccaccttcactagtgatgctctttaaatcaccaagaaaaagttatgtaaggagaaaacatacagcttccgtggagagaaggaacattttgctcagccttggggtatctgatttaataagaggctcttggagaacaaagccacaattcagcatcagtcttacacaccaaggagacaaagcatcgtgagggggaaaaccgcacacccagggacgcacaatcactatgcatttagaaagccagctcccgcaggtctgcttactcagccccaaggggtcctggaggtcttctcttccagatgctaataagcagtgcaggcttgtaagctgctggatggcaggatgcgagtgacggggacgggcggcactcccagctctgacaaatcctgctgcctcactcgaaaggtccatcagagaaggggtttcccagccccttcagcacaggcaatttctagggttcggctgtgctccgagctgctgccactgcatgtctgcaacagatggggaccggggctgggtgtgttcccagtccccaaggcagcgcaacaagcggctggcagacagcatgggctggcctaagacagcgcaggcaacggtcttggtggctggagctgctttgctgctcaaaatgcaggcagagctcgggcagattcccccattgacgggactgcagcaaactgtcattcccacctgtgtcaggcgctgctggggaggaaactccttaccacacagcaagccagcaggagggagggctggaccggagcttttaaaaagacaggcagcaggatggagggaggcaggagcagaggccgatgatgcagcagtggacagctctgggctccaggtcctctggccagcacaacccctgcactgttcccatctaacttcaggcaaaggcttcagaaatctgaactccctggggattcctgtccttggagcacaaagattgtgggggtttttttcccctctggccagaaggatgggtatggctttccaaaaggctctggcagtgaaatccccatttacactccattcccccaactccaaccagacagcctgcaaacatcatccaggagacaacatggtctctgcctatatcagccatgtctctgattttctgtattctgatgctttgacacctggggccttgctgatcctggagggactgccctcccagggctgggcaattcctggagatagtaagcaactcatctgtgagcttgcttttcctatgcaagccaacccacacagacccttcccctcctcacctcctcctgggggctctcacaccccaggccatcacccactacccaaatcaccccagggcaggtaccagacagctagggacagcccctgtacccacagtcccctaaaattattcacagaaaccacaataaagtctcttgcctgcatctcccccttgctccctctgcctcctgcccaaccccgtgcttccccacgtggcagtggtgtgcctagcctcctgcttccagggatctgtgagtatcatcagttccttccttcgtgacactcattcctgagtctgcatgtcttcctgtacctgattacaacaaatcccaggtgccctgaaaacaggctgtggggcagaaaatgaacttgaattgttaggagaaaatgagggtccccatttcagaaccccgccgtgtccctcattaaataaaacttgctcaggacttgaacttctcagcagtggaggaattgcttccaaagatattgagtgatctgttgctgcaggtattcaagaaaaggaggcttcttccacgagcctgtgactcaaaggctatgatttagtgggcaaatgtgttattcaggtaaggttgatggcaacacaaggtggaaaaagattaatgtggatgacgtattcaggaaggcttcctagaggggacagaagggcgttgcatggccatctactaaggcccacggacaaaaaggcggctgagtcagctgggactttggggggcctctgtaggggttggaagtccgtggctttcttaaagtcactttcagcccaggagggtaccaggcaatccagctgtccactcagagacctgacaaatcacaggcctggcgtgctgtggccagatagctctaagaactcacaagcctgagctctgcacttgcctacctgagcaggccattttaagcggaaactgttttttgttttttttttgtccgtagaatgagccatgtgttatgggatgttcctcaaggtccctttcagaccagagcattaatattctgtgtcaacaacccaggtccaagtcctggatcagtcatttctctgaacctcagttcttcctttgaaaaaccaagctgagtggaaacacttgctctgcacacctcccagggctgctgttgggatcatggatgaacacgcatcaggacagaaataagcatcatcctgggatgtgcgggattattctggaaccagagggcagtgctagcataaacctgaggtttagcagaaagctggcgccatttggcgaagatcgaagggccaaacctcctgcagcctgcagccagccccccgggcaccgatgcaagtggtcgaccagagatccggccaatctcaatattttctcctgctggttctggaactagccttgctgggtgagctgggcctgttttattttctgtgtgctttattccaaagcatacatacgagcctgaggaaaaaagcctaattggttttccttggaaaagctggaaatgtcagagaaatgggctccgtcgtctaaaggattcagaggtttgctacgcttggagaccagcgtttgagagtgacttatggggtgtgatgatgctgtagttctcacggcagcaattccacgtctcagggacccaggatcactcattagagattaaggaacataaacaactccactcctgcttgcaagctgcccaccgcaagcacggtcactgtcttcacctgcatttctcctcgcttccagaacctccactgcactccgcatgcaggtggctctgagctttccacctactctccctggagggcggagtcagctgtcttgaacaacagagcctagtagatcacagatacttagcaaagcctgaagaccattttggtgcatggggctggtgtcagaatcagaagtgaaaaggcaatgccttcctgaagcacatcccctcggactcacccgctctaattcatcctcctaaactctgtttttcaggcattactcttagcaccctcaccagacaaagcaataacaaaacagaaccagaaaaccttcactagctccatgccatctacagaacaaaccccacttcttcagcatgggctgccaggcccacaggagcctggcccacggtcatccttccacacccccaggcttcccaaggctgtcaggcctcatgacccttgggccccgcatgcaggcaccctcctgaccctagagcttggcatccctagaaagcctagccctgcccctaaagcccctccctggcacctgtaggttatcaccagggccctctcctggaactcatgttttgagtctattttaagtgctgagtattttacatatcctctctcaacctgcacaaaatactgtccattttatcgataaggaaattgaggcccagagaagtggagtcacaaaggttacagaacacacaagctgcaaatccaggattcgatcaaagtgatgttcccctccccagcctggctccgtacagcacatcctaacagggccactgtccctttattcatttttgtttatttttatcatctagtttttctgtggctcatgcttgtttattacttgcataattaagaataagaggaagatactcacacaccacaagttgagagtccccctttacaggtccagcctataacatctgaaataaacaaagtctgcagcaatacggaaaggatcaggtaccacctgagtgtgcagaaatgggatattgtcaagtatgttctgatagagccagacattggggccttatgatattacataacaagtcaaaacagtgacttcaaagaatgacaaatggcaaatgtgacaggaaaatctcaaatgatgcatggtactgcctgagctgtgtaagtggcctagaaaactagacatgcatgagcacacatgtgtaaaaggcgtgtctccagcccccaccccccaacccctgaataacagacctgggttagatttctcagcatcccagaaatctagcacaaatctttgccaaatcccatgccgccctcagcccttcacctaaaagtcaaatgctgcatgccaagctcacgtccctgcgatgaggcattgctatgcaggactacaccactgcaccccagaaccctgtgtccagagccaatctcggcaccaggccggcagggcagcttgcagagggagtatctgcaaaagggctgatggcaactgccctgggcagagacgctgaccaataaagcccatattctaccccccttttatgtgccaatgctgtccctgccctcactgtcctgcaagatctgtgcaggggaaagccagaggccagggcagctgaaagaagagggaaccccctgggctcaaggcccagcctcattgaccacacttttatttcacttgggagctggcagctggggattcggggcacggcatgccactggctggggccagcatttgagattgactgggcctggtgggatgtagacggtgtggcattttactttggaacctcattcctatgacagcttgaggccagtgccctgtactcatgaactctgtgcaatatgccaggtcctgtggttgcttctgaaatatcccaattgggaaccaatgtgccaaagagggctgctctgcgccgtgaacatccttgttgaaattcacagcagagggcttgtcaatcagctccctggcgaaatgagtggtgtgcagagtgagtcaggaggatggcacaggctgcagcccccttggataaagagacagagaatctggccggcccgcagcccacccagccccggtgacctggacgctattggtcttcatcctccacctccgaggacccagctgctgcatctgctgttagctagaccagtcctgccggtcctaacacctctgggtcctgctcggagtgcatctgccagagggcagcgctgagacttcctctgagctacaagaacaggttggacctgccgcctaaaatcgcctatagggatttggcaaaccctgctctaggatttccttttgttgtcataggccaccagtcccaaggctgtcagggggacacgcagcctcacccacctccagtcgctagagactgccaatatttaccaaagtaaccagatgtttgctgagtggctgtgctgagattagattagctgagaatagttcgcccccctgcccctccctgggtacctccatccaggtagaactaatagttctaaaactgcaggattgcaaagacatttggagtcattaagaccttgtgtcctgattttaatggagtctaaacaaaaacaaaccaacccccgcaaaggataacagtttctctatctttcaaggccatgttctgaccacctgaaggtcttgagatacttgggctactgcctggagccttacgggtgaaaaccggtcccctgagcctcaaatgtgggatggggccccagagccctctgtccaaagaagtgccgtgtgtactgagtgtgcatgcagctcctgcggtggctgacttgtgtttggagcatgtcacctgcccaatcagggacccacctctaccaaataagccagcaggtctataaacgctaagtcatatgtgatcaatcagtttaagtgacgtgcccaaggtcacatggctgtgtccttagagggccaaggctaagaccaggtgttcctgattttatgccagcacctgataaggaagagatatgcctatccactggaaaaccggctgagactttgtcccgtgaccccacagtgacttgtctaactccagtctgaacaagctcgatgtgtgcagggagcagaagtgagaggaggaaggactcgctattcacgccggcagctggaacctttttctaaaaaatggtgcatgccaaaaggagctgatgggcttagcataaattcaagagggacaggcttaagcatctgtcagagcttcactccttccaagaacttctctgacctcgctcctacccccatcacgattactcctccacacccactgccgtgggctcctttgacttccgtcattttgatgcttggggcccggcccctgtggcttctgcagggcacactctactcggaacaccgctccgtggcctggcccctgtggcttctgcagggcacactctactcggaacaccgctccgtggcctggcccctgtggcttctgcagggcacactctactcggaacaccgctccgtggcctggcccctgtggcttctgcagggcacactctactcggaacaccgctccgtggcctggcccctctggctactgcagggcacactctactctgaacaccgctccgtggtctccaacttcacgtctcccacagggtcaatgtccagtcaaggcaagagctcctcagacctgataagcaggagccactgtctggagatgagcgccaccttcaacagaaggaacttggcacttgggaagccccattttctttcctcttccattttttaaacaacaataagccgggcttctctcctaaccctgaggcccaccctgccctagcagctctcagtggcccatcaccactcccgctctctctctcggcaccccgtctcccagtcaatggatattcttaggaccccccccagccaggtacctgcctcatgctgcattgctgggacccaagaaaagtagaagagagagcctccaaccccacggacctcagtcccggccagaaggaaagctgtggagacagggaacaagcaggctgagagtccacacaacatcgtgtgtggcacagacagcagccaccatcatagaagtttccagaaggaaggggctactttggaagaaagtcttaaaaaataacttcatgaaaggagtaagactgaagctaagataagcaagatcaggtaaaaatcagaggcactgaagggtccttgcattttgtaaggccccagagcatcctcctcctttgttccctagacacactgtcaaggctctggaaggctctagaaggctgtggaaggctcatggcaactcgatctttcttttaagctgggaaccaggattgggcccaggcttggcacacacagaaggccaacaggctgtagcacaagcctggctagtctcaggcaggtgctccggggctgaatgtctgtgacctaaaacagcctcaatggcactgctgagcagaaggccccgggctgcccaggtggtagaaggccaagctgtcgtttagcatgcacaaggctccccaatttaattgaaatcaacataaaccacactgcacaaaaccattttttttctacaaattgccctctataacaatgcccctaagcaagtcctctctaagacacattggattcctcgtcctgagcacaccatgaaggagaaaaatgcctctactcaccctttgaaacggatgctctttttctacaggttcaaattccagctttgctttgccagtgctgggacgttggctaagtcatttagcctctctatgcctcagtttcctcatttgtaaagtggagttaataataattatgcccaccccacagggttactgtgaggattaaatccgtatgtatgtatgtacatgcacacacatacacacacgcgcacatatgcacatctgtaggctgagttttacggaggcgaacagggcctgagagctgctgggagccaaggatctgggaggcaccccagtgcgttccagtgccgcgtgactcaggtgtcagagaagcccatttaaagacctcaccccatgacaactgccactggggacagatacagagactctgaaccttaaggcaaggtaggaaatggcagaaagtaaataatagaatgttccagaaacagacacctgcagcctcctctgggtgggatgatgttctggccagggctggggccagagcacaactgccaccgccctaggaggcctcgagcccaggaacgaggtgggttcaggagggcagcaggccagggtcaagggcggggggtgactttactgtcagcaggccagggtcaagggcggggggtgactttactgtccccaaggcctcctttaatcaactgaccacgatgtacccagcgctgcctgggtgaaggcgctgtgggagtaaaaaggagcaaaaggcagatgcggccctgaagaccctctgagccagtcttgggacatgtctcagagcacgcggcggcccaggtccaggggctcccttggggctgggctgcacagctgagactgtgaaaagccaagggccaggaggcgaggggaaggctgagaggaacggtgagccggccccgctgcccaggcttgggcacctggggcagctggcctgtgagatggtgctgcttccagtggtggcaggtggacagcgtcttcccaagctctgacagacacgcttagtgcaatggccttggctgtgtggagccagggtcaggggtgcagacccatgtggacgccacctgcaccctgggtcaggtgacagggacctgcctccacacctccacgtcacactccctccctccccacaaaaggttgcccaatgaatccacaacacagaatgttcagccctgattcaaaaatgaaacaaacaagaaaacaacctccagcgactaatcagcctggggaagctgagtggccgccaagcccggctctatcacttgaaaatctagggctcctagaattcctcccagcgacctggttttcagaccccaccccaccccaccccacagcggaaaacgcaagctcaactgcagaacctgctccctgacccctggcttgtcacagcagcaggggccaggccacagccggactctgccaggcgtggcccctctcagcacagccgcctggggacactctctatgaagctcaggaagaacaggaaaaatgtgtatccagttttgttggctacagggattttgtatcaacatttttttttccaaaaattgaataaacactaaaacttaagctgaaacttcttaaatgttttaatgattttaaaagaaatatctcagaatgcattatactctgctgttatgggttaaagtgcttgcacccgcaaaaaagacattggagtcttcactcccagaacctcagaatgtgaccttatttggaaataggggctgttgaatttggccccatttgtgagtggtcacatgggccaggcaccgtggtgggtgcagacccctctcctaagtcagtccagggacaagagagtagatcccaaggagatggaacctcactcaccctctgcctaaccagtcctggcctactgggccatctgggggcctcatctctgattaaaatgtcaaactccacatcagaggctagggagagacgtgggaagagatgacaccctccatctgtttctggaaacttccacagcctgatcctatgatcctttaccagggctgggcccagggatgtggggcccagagtcattcctggtggatgggggctggaaaggaggtaaagtccacccctggctaaatcattcgtctacctggagagaaaattagaacctctggggagttttcaaaaactagatcccaattaagaactactgaatcaaaattgctggggctgagaactgggtgattgaaatattctgctaagtaagaaccactgatagcacccacccacctcactgtaaagacggggaaacaggcatagagagaaaatggtgtgtgggaggcccccagttattcttggtataacttatggaggcagaacccaaggaacctctgagaagggaactgtgaagtcggaaatctgagctttccctttaagaaggaatcagcttttgatttaaagtaaactgagaggcaattccttggacttcagggactcaagggcatgccgtaaatcgcccttggttcagaatattcataatattctatgacttggaaagcttcttagctggaagcttcgtaattggttcaggtcaaagatcccagttcagcttgtgttttgctcccctcggcttttccccacttcctgtcatcctgcctggttcctgacttccacattctaagaagatacagaagtgattggattatgctgcttgtgttaacatcaaggtttgtggaaggtagtgcagatagttgccggaactcctaagccgcggtgaatggtatcgactgatactttaaatcgtgatgagattgtaatgagatcctagtagcctctgtgtggagcccctccctctaggagggttattatccccactacccccaccacacttggctgtgtgccttgcatttcccagaagtgatgggtgccacttcccagtggaagcttttggagctgtctgacacctctctcctgctcctctcacagcaagcacccagacaggaactgctccttcagcctgcggttcccaaaattaacaggacacaaagcagagccccagctgtcggtgatgcatgtacagcagtagcgagaaatgcacttctgtcctggcttgctgctgaggacgtggggccacttactaccccagcggaactcagccgacactcgtgcgctttctcctgcccccttccctctctttcttctgagtctattccctaatcctaaataaactcagtgtaacttatagcgcttaagaaggtcatctaggcggggcacggtggctcatgcctgcagccctagcacttcgggagactgaggcgggcggatcacgaggtcaggagttcgagaccagcctggccaacatggtgaaaccccgtctctactaaaaatacaaaaaaattagctgggtgtggtggcaggcgcgtgtaatctcagctactcaggaggctgaggcaggagaatggcttgaacccaggaggtagaggttgcagtgagctgagatcgtgccattgtactccagcctgagtgacagagccagactctgtctccaaaaaaaacagaaggtcatttgttggcttctttgccctggcattgctatttgaatcaaattcgaattaaagggcctttgagaatgtagtcctaaacccaaataggacacgattctttgtttttcttcattaaattcactttatattattctctgattatgaagactttgagtatatgattcgtaccctcaatgataccttaaaatgatgtgaggatgggagtctttttgtataataaatgctcccaaccctgacatagagccagacacccaacgcatgcttcctctggcccagatttaacatgcactggccgctccccatgcacctggcaccctaggtgacaggggtaccagatgaagcacaagtctccgccctccagggaactcccagcacagtgggaagaatacatttgaagcctgttttttcccctttcatgttaaaacagagaacttcctgccctgtttgtctctgggacgctcctcaggcccacatctcctttcacgtcccatcccctgagctggacatttgttcagcaagtcctttcctgagcacaaatgcatcgagcgaagggatgcccagcattacagacaccagagcataaagctgtgtggctcagagctaggtcaagcttcccatcccagcctaaggcttcttcactccctttcctggccccaattgcctccaaacaaaaatcagcaagcaagccgccagtaggtccttggccagcatccagggtgaccaattagtctcggtttacccaggactgtgtgggtttaaaacaggaagtcccacatttgaagaagcccctccatcccagagaactggagcagctgtcaccctaacaggtagagtaccttttccccagttggtatgcaaagctgtgcacccaccaccgccctgccctaaacacccccacccatccattctctctttctccatctctcctgacttccagttccacttttttttttgttgttgtttttttttgacagagtcttgctctgtcgcctaggctggagtgcagtggcgtgacctcggctcactgcaacttccacctcctaggttcaagtgattctcccacctcagcctcccgagtagctgggattacaggcaccgaccaccacgcctggctaatttttttgtatttttagtagagacagggtttcaccttgttggacaggctggtctcgaactcctgatcttaggtgatccacttgccttggcctcccaaagtgctgggattacagatgtgagccaccgcgcctggctcagttccattaatttcacccatttcctctttccatttccagctcttcataaggaggaaattccctctcaccttcccttcctctctctttcctttatgaggtgaaaatgtaccctaatcattgaaaaagaaaagagctagggatttgtatgctatcaagaaaaagtaatgactgtaagtgaaaataaatgttctaaagggacattaaacaaatactagacgtgatacatcctcaaatacacggagccctcttccaacattctccatttatttttttccttccactgatcaaacttgtttttcacaaaataccacttttgagttaaataaaacaccattgcaattccattttctctcctgcttcctaattgctctattcacttgtttattcacccaacagaatgtgtttctgtattgcacacatacatcacggcagagactgtggtcaggaaaggctgtattgagaaaaaaaaggccacctttctacaagccagtgaaaatcaggtttggagaaaatttaacatggaaggctggaaccagagaacacagctgtgtaggatggaacactacagataagtcatatatttgggtccagacttcctgcagaccactggctctcaaccttggatggacacagaaatcatctctggagttcaaaacaacaaccacaaaaaccccaatgcctggtctcagagtttctcatttaatccatctggggtccagtgggaactgggatttttatttattttcatttatttattcattcatttatttttgagacagggtctcactctgttgcctaggctggagtgcagtggcgcaatctcagctcactgcaacctctgcctcccaggttcaagtgattctcctacttcagcctctggagtagccaggattacaggtgcctgccaccacacccagctaatgtttgtatttttagtagagacagggtttcaccatgttggccaggctggtctcgaactcctgacctcaagggatccgcccaccttggcctcccaaagtgctgggattacaggtgtgagccactgcacccagccggaactggggtttattaaatgtccctcaggtgattctaacatgcagccaaaataggtaggtagacctagagaaaggaacacagtgggttccaggacgctcattttacataaagagaaatatgctttttaccaggaaaaggtcctgggtagaggcacagcttttccaaacacatattccagtaggaatttcttgaggtggccttaggtaaaaaaaaaaaaaaaaaaaaaaaaaaaaactgccttgctgtagcctgtcgtggtatgacttccaatgccagagcctacgtgcctccaagggcagccccaggaggaccacgtggcctccgtcttggtgctgttgttcctgatattgtaatagtggatgtgggcgcttccctgggttccagcttcgcagcagatgccatgggctccccatcatgtcgcttcctctcccttcccatccagtccagaaaaactcccagggtgattattcaggtcaacatgagcctggggtgtgatctcaccttggaacaaaggaggaatcccaagtggatccaggtgcactgggccacccattcacccagcaagcacacagcaaacgcctgctacccaggggagccccgaccccaggctggccctggaatgagtgcaactctttgtccaggggtctccacgcttttgtgaggaagagctacctctccttcccacagagcctggagataggtccctggtcacagtggcattctgggggttttcagagagtcctgtaatggatatcaaatcctagcccaacaaggggtgacggcaggactctccccggattcaggtctatgttgtattcatctctgcacagttcctgatagacagtgcatgctcagtaaatatttgtttaaagagagaatgaacagtttaatgcatgaagaaaaagaatgaccctaaaagccatctcacagaggtgacactgctataaaggctagcaaagcaaacttaggagagaaaggaagaaattttcatagtcttagaagcctacaaactgaccgtggctttgtctcatctcttcttccctccttttaagggcctttcactcaccacgatatcaatataaaactgccaatacttgggcctggcatggtggctcacacctgtaactctcagcactttgggaggccaaaatgggaggactgcttgagctcgggagtttgagaccagactggacaacacagcgagaccctgtctttacaaaaaaaaaaaaaactttaaaagtcagtggggcatggtggctactgaggaggctgaggtggaaggatcacttaagctcaggagtttgaggctgcagtgagctatgatcacaccaatgtactccagcctgggcaataaagagagaacctgtctctaaaaagcaaaacagaacaataaaaaataactgcttatacttgtgtttatttgacgtgttctcaatgtgttagaaggcttcttaaatgggataccgaaagcataggtaacaaaagaaaaaacaaaagcaactggacctcatcaaaatgaaaacttctgtgcttcaaagcacaccatcaagaagatggaaagacaacccaaagaatgaatcatatatctgatagggacttgtattcacaatacataaagaactgttcaactcaatagtaaaaagacaacccaatttaaacacaggaaaaggatctgaaagtcatttctccaagaaagattcacgaatgatcaataagtatatgaacataagctcaacattagttatcagggaaatgaaaatcaaaaccacaatgagacaccacttcacacccactgggacagctagaacataagagagacaattacaagtgttgacaaggatacaaagaaattgcaatcctcatattgctgggaattgctggtgggaatgtaaaacggtgctgccagtttggaaaactgcctggcagtgcctcaaaagttaaatgtaaagtcacaatatgacccagcaactccactcctaggtatattctcaagagaaataaaaacgtatttccatacagaaatttgtacacaaatgtttgtagcagcattattgataatagccaaaaggcggaaacaacccaaatttcctttaactgatgaatgaataaacagaacacggtatattcatacaatggaatattatccagcccatagaaaggaaggactgatacatggtacaacatggatgaaacttaaaaacatttcgttacgtgaaagaagtcataaaagaccaaatatcatacaattccttccggggaccctgcagcgggggagggcataagaggacggggttgacggggggaagccaggcaggagagtcctggagggggacggtggccccgtgtacagcctgcgcagctgccagagttcctgaggagaccgaggcgcagacacccccctgaggccatctgacaatgagcctgcctccattggtcattagtgatgtcagctggggaggggcctggacagaaccacactttctgcgttatagaatccaaggttattgaggatttcattctagatggagaaatgggatggaatggcttctgttccaatgtcgaggactgttccacctggttttttttttttttttttaccatgctcacgaggggacacctggggtcgctgatagaagttcagcggtttgccattcgccattctcaggcttgaaactctgtgcctggcccaggccgagaggaacctatctgtccgcaggctgaccgggagccacccttcccgccacctgcacgggccagagccaagtcccgccacctgcactgtgctgtgtgggccacggaaaggccaagtggcccagggtgcacctctttcctctccagggcgccctgagatgcagggagcaggcagagaagagagaggccgaggagagaaataagccaagcccggggtctgagcaggctgcacctggcatccgtcagcatctcactctcctttgaggtaacacacggagctggaaggactgggggacggaaactctgagccctgaaaggcccctacagtgtgacctgagaagatctctcagagaagcttccagaaatccatctgtgcctccccggccctcccgcgatgggactcatgaggggcagcaaagagccccgggggcggggggaagaggaaccagagcctggcctgaggcctcctgcgggatggtggacagctgaggctgctctggaaaactccctctggccaaacttccctcttttatgcttcttaggatgggggcggggcgggggggggttgtgatgagagggaggagcgtggtcccttctttcactatttattctacacatgttgtgctctctcacctggagtgacttcgagtcatccaatgtcactaaaaatcctttcttttaggtgaaggagtttccctcacttaattctcccaagaaagattcacgaatgaccaataagtatatgaagataagctcaacattagttatcagggaaatgaaaatcaaaaccacaatgagacaccacttcacacccactaggacagctagaacataagagagacaattacaagtgttgacaaggatacaaataaattgcaatcctcatattgctgggaattgctggtgggaatgtaaaagggtgctgccagcttggaaaactgcctggcagtgcctcagaagttaaatataaagtcacaatatgacccagcaactccactcctaggtatattctcaagagaaataaaaacatatttccatacagaaatttgtacacaaatgtttatagcaacattattcataatagccaaaaggtggaaacaacccaaatttcctttgatgaatgagcaaaacatggtatattcatacaatggaatattatccagcccataaaaaggaaggactgacgcatggtacaacatggacgaaccttaaaaatatttcgttacgtgaaagaagtcataaaagacttcttttaggtgaaggagtttccctcacttaattctcccaagaggtggcccattaaagtggtttctggtcatcacaccttagtgagttaatggctatggtcagcggagttctgggccaatccttacagcaggtttaggcaaacacgtgcccttgtttcactgatgtggcaggaaaacgtgttctgatattcatttgtatgttcccccccttgcacgccctgcctcctcctccaagctggtctcgggtcctggcctcgccccctggagggagttctgtgtgcccgacaggtgctgtgtcccaggcaggagctgtgtcccggtcaggtgctgtgtccctggcctgcctgcaccgaggctggggcatcctggcaggatcagaggccgctagggaggtgacagagtggggagcagaggacacttccccagaaccgagacgggagagaggggccagatctcagagcggggtggctgctgcatccaccagaacaaactcacacactggggcctccactcggcaaagaatctcaaactcaggcctggctgctgcacgaaatctccaagatggaggaatctcaggagtctggactagaagggtacaggggccaccagatgcctggaacccagactcttctgaggcctgggggaaggggaggaaggtccctcccagaatgcttgaaattgaatttccccccaacccaatagggtggacactagtgactgattagagggaggaagaggaggggaggagggaaggagaggaggagggaaggaagggaggagggaaggaagggaggagggaaggaagggaggagggagggaataaatctgagtctttgccccacagagtttgtggacaccagttcacaccaaggagacctgcttgttgggggcgaagcagaagctccgacttctgggcagtgttcacagtgccttcccaggcagccagcagaccctccatagacacctgcccactgtgggaggcgtgggaggctgtcagaggttaggtccacgagaaagggaggagggtcagggcggctgaacaccccctcagaggaaggagcctaggggttctccccccttcccctggggctggtctgctgggcactgaggcatctctggggggggggtcccagcacagcccaccctgggtcccttccacagcgtgagccccccgtgcctgcaaaggaacgcaggatccatgtccactcctgaggggccgctctcgggtactctccaggtgctacctgggactgaggcgacaaaagctcagagcccacctctgaggcccatcctcagaccttccctccctcttctctaggtaataaatgggcagcctcccagagacccctatcccaggcgagcagttaggacggtggccatttccagggaggccccgtgccctgaccccacgttgcaggacccgctccggactagcctggtgttcctcccaggacacccacactgtcccctgaaaagtgggggacatcttggaggaggtgggcagatcaggtgtctgaggttgctggcactcactcgtttatggtgcaccagccctggaagattcaggaacagaaagacagacagcgtccatcacgaagctggctttccagtggagaggcgcatgtcaaaataaaaagctaatttcattccggtaagaactgtaagagaatcaggtgtgatcagtgcaacagagagcgcgtgagtcttttgattagatggtcacggaaggcctcgtggagatctgtggggtggacctgagaaagggaactgaccattggaagctgggacagagcaccccgggcaggagggtagccagtgcaaaggccctgaggcagggctcgggagtgtgcagcgggaagggttctcatccctgctcatccctgagcaggacagggtgtgacgaatgatgttcaaaggctgttccagctgctgagcggaggaggccctggaaaggagagggtggaagcggcagggagggccctggggaagtctgcagggatggtgcgggtgagagacagccctgtgggtgccgccctcacctgcgctctgctatagagaggagagccagagcggggcggcaggagtgtctgtctcggctcttaagccgatggacgctccagaaacccatctggtccccagccccagcaccagccaagatccttctaactccagcgggcttttcagttgttccaggggtgggggatagtttggagaaataacacttcccctgtgattaacacattcagaaaggggcaaaggggaggttggcacgaggcaagcccagaatccaactggcataaaaaataagtccttaatgaggaaaggttcacagcctccccgctgtgcctcccccagatggcgggagggggtgtgttctgtggggtgcccagtgcactggcacacaagcacactgcccccgctgggagcctgaggccacagccagcatttccacctcaccgtccatctctccttcctctaggagaaggcccggcccatggcgggggccaggcagggataacagaatagtgaatctacttaaaaagttacctttgctaaatactcaccttactgccagtttctggaggaaaaaaaaaatagaaaatggcagcaggtggatcattccccgacagcagttaaatgcaccttggaaagaacaaggtttctgcccagcagcccccaacagggctgaccctgaaaacttaaggacaaattcaaacaaggtgtcaactcaagtcacagaatttggtgatcatgatttgtcttaaactgactcccacttctaagggaatgagaaagtacacccaagatgacctgagccacaatttttggtaaattaagtcctgtaaccaggtacaggtgattcccgttactcaaggtggttttgctccacaaagtcgccaggcacactgagttagcaaatgctgagccattgttttcaggggaggtgcagggttagcttcctgggagcctctggccacgtttttgtcaaccaatcagtacatcacgttgtttgatgtgggtttctgtttaaataaaggcacgggtgtccctgtttgcaccgcacagcgcaccctcaggtgagagtcttccgggctgaacatcccatctccacatagtgggaggaggaacacccagcactacccctacttgctggaatgtggaccatctggggtcggaagggaccctggaaagcatctgatgaggtgcagagaggtttaagcccccaccccaggaacggagtggagggagtgtggagggctacggcgcagtgccgcccctccccatcgctgtgggtgagtctcctggggggctttgaacaacagaaacgcaccatctcccagttccggagcccggaagtccgagatcaaggtgtcggcagggctgggtctctctgaggctgagagggagaatctgtccaggcctttctgccagctacgggtggctgccggccatctttggggtttcctggcttgtagaagcatcaccttgatctccaccttcatcctcaccagaggtctctccgggcatatctgtgtccagaatccccctcatacgcagatgccagccatgtggaaaagggccagcctgctccaatgtggcctcatcaaaactcatcacatcggaaacgaccctgtttccaaaagaggtcacattcacaggtacagagggttaggatttggacacatcttttaggagacacacaattcaactcataacagggtgcccttagaaaggttttatgttcatttgtttttagggtcagggtcttgctgttttccaggctggagtgccatgacacacacgatcttggctcactgcagccttgacctcctgggctcaagtgatcctccaggtaatatttttattttttattatttttattatttttaattttttgtagagacgggtctccctatgttgcccaggctggtctcgaactccttggctcaagtgatcctcccacctcggccccacaaagtgctgggattacaggcattaaccaccacactcgacacccttagaaagttttcagaaattgctcttgtctgcctgcttacccttccgaggcatctaacagcatcctccctggcctaagcctgggagccttcctaaaggcgtaagctcgcctttaggaaccactctcgttgtggttttaaattgtcatcacttgccagataaggagaggttgctgtatggacagacacacaaggagactgacccaggtcctgttgcaggacagtcacccagcatcctggccccaccctgggcttccattggtctggatcggacatcccgggggctctcgtgggcagcctggtgatgccaggaggaagggcccactgtgatggcagattgctggctgctcaccgtgatgaaagtgcatctgtcccacaaagggcagcctttccgtattcaagagtggggtgcagctcagggaggcatcggagatggggactgtgacgaggccaatccacgggcattgattgctccatggaccagcgtgtctgagctccctgtgaatgtatctaatttgtgggacttgcaggacccaggacccagtgcacatcctgagtctaactcaccccgacattttttggttttaaaccagtgagatgtgattacaatgaatattcatgaccgcttcccatatcctgagttttgtcttcggccgtgtctttggagcattccttcccctatagcatgatttctcttttatgttttgtctgtcatctcttccccaggagactgagagactcgggggagcaggggctgcgtcaggaccccctttctgccacccccagcaccagcccgagacagactgtggtctgactgcaggctgacacacctgggtccacaggctggattctcaagaggggcgagagaatggggtggtggctgccccaggccagctggtccaggcagcttccctgatcaccgcagtgacgctcctgctcaagctgggagaaccagggtcaagtcccttcactcagtcaccaaaacaagaaacaaaaacaacaacaacaacaaaggcaaggtggacccatcgctggctcctctgcctccaggggatcagaacttgcccccttcccagtgtgaattcccctccgatggggtgtggaggctggggtagtctctaggctgtcccagctgtgcctctggcctcctgtctgggtgcagccttagcggggcacaggagggcgtgtatgcgggtcctccagggtcctcaggccacagctcctgggctggagaactgtgaggtaggacctagcccctcgggtcccctgccctctcctcctggcaggttctctggctttaggcattaatgtcctgtgacaaattcacttaggactaagaagccactgagaatattcagttcttggatcatccacaacagcggaagcagaacagagtgagcactccagacgcgaaagggcccggcccagccagcttgcggggacccccgagacgaggtccctgccagactgccaatgtttatttgaggctatttgtttaaattcaacttgaaccccggttacctccagctcagccctgccctgggcgctgcgaggaaaacaaagccacaccacaccgtgcacagccgtcttcacatctctggaagacatcaccgtacaggagcggtggggagacagaccgaatcccataaagtgtgacctcctgccactgccacagccagggcagagtgcccttcggggctacacagctccccccaccaccccaatcattacaggagaaagcaaattggtgagacctggtatttttcattaaacagataaagtttattttcttcaaatagtatcagaaatattttgaaatgaccctcaattccacattggggtcaattatgggggagggaaagggggaaagtggacaggaagataaggtggaagaagagggagagaaagaggcagtgctggcccacggggatggcagctgggggtgaatccgggcgaccctccctccatccaaccgtcggcgctcgcagggcgttgagagtgcttcacacaaacggagagaaatggttgatattagtatagtcatggttaatataaaccttaaatacctttttaaagattagaagctgagctgggaacggggcaatcaggcagcctcgaggggggactgcagggagcaggggagaggcttagagagttctgaatgccacacgcgaggcacttttctcagggggctcttaagccctaacacctttataatttccccttaagatgctaatgatctattaatcactgtttctggctgacttccctttacaccagtgccttcagaagctcccctaccgagtgggcctgtcttagggaggaattacttcctacagctaatccagagttcccgccccctgcaacaaaacccacagcagcttctcctccggtaaagccgggatctgagcagacagtcactcctgtgggcagcgctggctggaaaggacactggagcaggccgcgcctgggccttggagacacgcacaggaccctggaggaggccacacctgggcctcgggaacgcgcacaggaccccggaggaggccacacctgggcctcgggaacaggcaccagcagaggcaggactggaaaggacaggagaggctgggcccacatttaatctctgttccctctccctccacagtggtgcctttatttctagaagcaacgaaggaaacacagtagactcagagccagaagaggaagaggaggccagctcccactgctgcagcactcagctggggtcagcggggctgtggcgttgcaccactccatgaagggcctggtgtcccttgacttggacaccctcgaccctgccaggctcggccccacagccttgctcaatcccctcagcaccctcgtctccagcagacgggtatcctggacatgtctcacctgatttgacacaagaccaccaagacaaggggcaggtgggtgcagtggctcacatctataatcccagcactttgggaggctgaagcaggaagattgcttgagcccaggggttggagatcaccctgggcaacatggtaaaacccgtctctacaaaaaatacaaaaattagccaggtgtggtggtgcatgcctgtggtctcagctactcaggaggctgaggtgggaggaccgctggagccagggaagtcgaggctgcagtgagctgtgtttgctccactgcactccagccagggagataaagcaagaccctgtttcaaaaaaaaaaaaaaaaaagtaaagaaggccaggcacagtggctcacaccggtaatcccaacactttgggcggctgagacaggcagaccccttgagttcaggagttagagacaagcctggccaacatggtgaaaccccatctctactaaaaatacaaaaattagccaggcgtgttggctcatgcctgtagttccagctactcgagaggcttagacagaagaatcgcttgaacccggaaggcagaggttgtagtgtgcagagactgagccattgcactccaggctgggcaacagagtgagactgtctcaaaaaaaaaaaaaaaaaaatagaaaaggggcagcttcctctgaagccagctctgcagactggcagctgcctgacacctcagccgggccatttcctgaacggctaggcaggggcacgttgggctttaactgccctcagccccaccccaaccagggctcgctgcaccagaagcttcctagaaaaccacatcttttctgctaagaatcagaaaagtcgtgatattctcagacatcagccaactacagactggcctgcagaaggaaggaaagtagaaggaggaagtcaagtgatgctggggcaaggcagcgtggccgggcaccgcggtcggaactctcgtgctggtttgcagctcagaagcggtccgcagcccctgccgtccagccctaaccctgacctctttaggcctcagtttccccacctagacaaggatgatggtccatgagtctgctatttttcattgagcaaccttgtactcagtgcctgttcggaatgagaatagcaatgtctacagttccaatgctttcgccacaccttactcatgtcttgtatttaaatccggtctgatgatttacataatgcttcacccacgagaattccttcagcagggaatgagggtgtcatggagacgccgcctcgggcctcggtaaccactagggaagaaacgccagggacacctggtcctgacttgggatctggtgctccaggctctagctctgtccatagcccaagggtgctgagccccaagtggtcacacctgcaatgtcactgagcttgggtagtggtccatccagggccagccagcccaacgtagcaggggcccgccttccccagggacaccgtgtggcccaggagccacagcagaggaagctgagcagggcggcagaggaagctgagcagggtggcagctccctgggaggccacacctgtaccccaggggttcttggacaattgggggcagggctcaagagggagatcagatatccccctaacaaagagagtgggggctggagcggtgaatttggacactgaaagaggagtgactgtatttgtaccctgagtgtgtgcgccagtccttgagggcattacattttacattacgtttgtaatcagaaaagtagactttcaaaagaagacatcatctaagttacttgttaggagtggcagattcatctccccggagctggtgacagtagggaggcatttgaaaaggtgcctggacagcacaggccttgagggaggacaggtcctccatgcccagaatgcaactggctggctaaggtgccttcgaggttccccaggctgcctgtgtagagaaagcagcagctggcccagcagcccagctgcaaagggccctcaccatgcaccagttagttactcattcattcatttagatgaggtctcgctctgtcatccaggctcaatcatagctgggtggggcaatcatagctcactgcagcctcaacttcctggcctcaattgatcctcccatctcagcctcctgcctctgtgcacctgtcccgaggccccaacctgcagtcctgagactacagatgcatctggcccccggacctgcactgtgtggatgtggcttctgtcagttcactgcctcaggagcaagagtaggaatgggaggtcctcccaagatggaagttcactgttctgtgaaacatgaaccccccggacctccgtcgccagagtggtccagcagggtgcacaggggctccggccccaagccggcctgcttctgatggaggggtttacaccggagcgaggagctgcccacccgagtctcaggctcctcattcatcaactgtggatgttgttagtttaagaatataaagtgctgccgggcacggtggcacctacagtcccagctacttgcgacgctggggcaggaagatcactggagcccaggtgttcaagtccagcctatgagacagagtgagaccccatctgattgactgattgattggttaattgattaattgattggttgagacaggatctcactctgttacccagcctgaagtgcagtggtgcgatctcagctcactgcacccttggcctcctggattcaaacaattctctcaccctgcctcctgagtagctgggactacaggtgcctgccaccacaccaagctaatttttttattttttgtagagacagggtttccctatgttgccatggctggtctcggactgctgggcttaagtgatcctcccatctcagcctcccaaagttctgggattacaggcatgagccaccgtagtgagggtagcagtggtggtagtaacagtaggtagtgatggtagtgatgttagtgatggtaggtagtaatgatagtgatggtaggtagtgatggtaggtaatgatggtagtgatagtaggtagtgatggtagtgatggtaggtagggatggtagtgatagtaggtagggatggtagtgatagtagtgatggtaggtaatgatgatggtagtgatggtaggttgggatggtagtgatggtagggatggtagggatggtagtgatagtaggtagggatggtagtgatggtaggtagtgatggtagtgatggtaggtagtgatgggtagtgatagtaggtagggatggtagtgatagtagtgatggtaggtagtgatgatggtagtgatggtaggtagggatggtagtgatggtagtgatggtaggtggggatggtagtgatggtaggtagtgatgatggtagtgatagtaggtagtaatggtagtgatggtaggtagtgatgatggtagtgatagtaggtagtaatagtagtgatggtaggttgtgatggtagtgatggtaggtagtgatgggtagtgatggtaggtagggatggtagtgatagtagtgatggtaggtagtgatgatggtagtgatggtaggtagtcatggtagtgttggtaggtagtgatggtagtgatggtaggtagggatggtagtgatggtacgtagtgatggtaggtagggatggtagtgatggtaggtagggatggtagtgatggtagtgatggtaggtagggatggtagtgatggtaggtagtgatgatggtagtgatggtaggtagggatggtagtgatggtaggtggggatggtagtgatggtaggtggggatggtagtgatggtagtgatggtaggtagtgatgatggtagcaatggtaggtagggatggtagtgatggtaggtagtgatgatggtagcaatggtaggtagggatggtagtgatggtaggtagtgatgatggtagcaatggtaggtagggatggtagtgatggtggggatggtagtgatggtaggtagtgatgatggtagcaatggtaggtagggatggtagtgatggtaggtggggatggtagtgatggtaggtggggatggtagtgatggtaggtggggatggtagtgatggtaggtggggatggtagtgatggtaggtagtgatgatggtagcgatggtaggtagggatggtagggatggtagtgatggtaggtagtgatgatggtagtgatggtaggtagtgatggtagtgatggtaggtagtgatggtagtgatggtaggtagggatggtagtgatggtaggtagtgatgatggtagcgatggtagggatggtagtgatagtagtgagggtaggtagtgatgatggtagtgatggtaggtagggatgatggtagcgatggtaggtagtgatggttgtgatagtagtgatggtaggtagtgatgggtagtgatggtaggtagtgatagtaagtagcggtggtagcatggggatgctgccgtgaagcagaggaggcttcacaattctgattgtgaaggcttcagaactctgatcttctcaattcaggtggaaacgtgtctttaggatagaaaacaagtaaactgcaggattcccttcaaggtctagttcttccctgtccctactttgggacactgctgaacaggctccatctgagttcaagaatctgggtgtatctgtgcaggccaacaagccaatacagcaggcatttgaaagacacacatacacgcaggccatgcttttagtcatgcaaacacacagtgtctatatatctatgtgcacagatttctgggcatgaatatatgtgttccaagccccagtgtacctacaagttttgatataaacctacacacagacgtgcagcatatgtacacagataatacttaagtgtccacatgtctagaacctggaacaaagctgcatataaaagcagatggaacacagcagcagggctatgtctcacgttgtcgtttcctgaagctgatgtacatgagacacttcattctagttctgtggtttctgcaaggaactggtgggccaaccattcctaaggaatatggtgttgacaagctgaagacaggctgcaccatcacgcggctacagctgttgttctgaatttcaaatctggtggcttcattgttgttttcccaaaagtttcatgaattatgtcaccaaaaaactcactgatttatggagtaaagttgaagcaatatctagttggtgtgttttcaaagagaataaatggatttctgcttgcacttctattcccagagctgagtatttgagtgtttgttctaggatctggtatcacacagccttatctctatccccactggggtgaggccccccaaggaagtttaggctggaacttgagaccacttatcaccaaattaataaaatagattcatttggaatcagctgactcaaagcaggaagacttggacccaattcaaacatctagaccaaaacctacactctgtttggttaagatcggatagaaattcttcctcttcacatctcacatccatggacatgtcatggcagaaggctccatcgtcctcagagcccagccagggaaggtgagcaggaggcagcacatggctgcccacctctgtagaattccaaggaacagaagctttttaaaaattcagattccaaggcctcagcctgggcctcctgactcctggccagggtttggagatgtagaaggaggtagaaggaggagatagaaggagatggagaagaaggcatgagtcagtttcctcccacactccaggcctttcccaggggttggggaagcccttgggaagctctcctcttttgctgcagagatagagaaagagcgtggctctgaagttgtggcagtgtccctcagagactggtcactcactactacagaccacaggcaggccagtgctccctctgggcctcagtgtactcttctgtaaaatgggaagatcatactgggtgacctcatccctaacacctcgtctctagctctcaacttctaccactccgcgaagtcgtgtgggctggaagtcagagcggcttcctcaaagaggcggaagaggacccatcacatgaaggggctggtttggcgaggcagaggtgggaaggaacgggggtaaaaaccctcccacctgggtgagcgtgtccatcggagcagtggttctcaaatgagaagcccttccccatgagcgaatcacaaagttattttaggtaggtcatacgaaatagaaagagatacgaaacgtagaacagacaataactcagtgcctggcaaacagtgagcactatgcaaacacgagttattatttctatcgtgagtcatggtccaaaagtttgaaatacactaactttctgtggctcactgtctctatttcgtcaccagcatgtgacctccatgagtgagggatttttgacagttctgttcactcttaaagccccgtgtctaaaacagtgcccggcacaaagtaaaggctcagtaagtatttactggatgaataaatcggtatcattccatgcaattgttgtcacatacatatattccctcttgggctagaccgcctgggtctgagtctggcagatgaattctgtgctccccagcccggcaaacctccctgggacacggggacgtcacagctcctcttctcggtgctgttgaaaagagtgtatgcggagctccagggatggcggcaggcagcctccgccccgcacaagggtgctgggagacatctgtccctccccacctgcccctgttcccagctgccccccacatctcaaccccacagttccctttcctggcaggatcactgctcggcatccctctcctggcagcgacaaaaatggccctcttcaccccgacagcctcttctcctcgtctgtggcctgcttgagccaggatgggactcatttccttctcaggtgaagacgttgttagtggagaaaatgaatcttgggctaatgagctgatcagaaccttgagctgcaagagggctccggctctcttcaactcctggcccagtggtcctcagagcgtggttcccggaccagcagcgtccttgtcaacctaggaacttgctagaaaagcacattcatgaacccgcctcagacctactgaacggaaaactcggcggtggggcccagcctccaggtgaccccagagcttgctcaagtttgagaaccaccagcctaactattgttgaggagggaggaagcggtggtggccccacttggaagtctgggccctggcagcatcaggactgactcgtgggggaggcgctgggaagggaaaggcggtggctgccgttttcagatgcctgcctcccttcccaacctcgtcatcctcacaaggggaggtggctgccaagtcacctaaatgctgagggcggcaggtagtgggagccgcatttcccaaaacactgcgggggcgggaaaggccccacctaggagatcagagctcttcccaaacaccaacggcaaccccagctcatcggagccaccaggaataattcttgccattagccccagagtctgccgctccctcagggtccctctcccggcatctgggggctggattttcacacacacagtgtgtatggtcccggaacacagacgggtgctgtcctcagatcgggggctagcagggtctggaggagccctcctcaacagatgagtccctgtgacatgactttccagagccagacctcccggcctgatcagtgctcgcccctacttgcggtgtgtgagctgacacgatttaccctgatgggcagctgtttatttttacaatttatggtgaaccatgttagaagttttccatttcttctagtcttagaaagtttcttttaaaaataaatgtaaggccgggcgcggtggttcacagttgtaatcccagcactttgggggtgggcagatcacttgaggtcaggagttcgagaccagtctggccaacatagcgaaaccccgtctctactaaaaatacaaaacttagctgggtgtggtggcgcacgcctgtaatcccagctactcaggaggctgaggcaggagaatcacttgaaaccggtaggcagaggttgcggtgagccaagatcgcaccactgcactccagcctgacgacagaaactccgtctcaaaaaaatttaaaaataaaaaaataaaaataagcttaaaaattgcacttggatataaaaattgtgcaggtgtgaatggctgcaatttggaactaccctatcccacaacgccacctctgtttctgagggacaccgtaacttaggacgctggcaggaggtggtatatgagaccctttgtgcatgtatgtctgtatgtgtaggtgtgtatgcgtgtgcatgtggatgagtgtttggacgtgtagataaagtgagtattcttctggttatctttgtatctttgtaaaatgaatccccctcttataaccaccatagggcttcataaatgccatgtcctacagtattcttctgtagttggattctaggacgtttgcatgactgttctaaaaagcttggtcatatttgaagaggaggacagtccactaacacgcacagctgggaatgagatccagttttgcaaagggatttgtgttttaatgacacaaatgtgagtcctcatctgcttcttaaactgtcagcaagatcaccaaggctgttactaatgtaagtgtgtatgggggtaagcggctgggtgagggactgctaggtaaatgctctcggccttgtacctgtgcaaagcccatgcttgacgggggatgcccgagagggaaatggttctggaatctcccagtgaaaccgcctggactttgcaggaagactgcagccttaggctggggtccctgatgtctagtgttattctgggtacacagcagtgtccacacagcagataccagcttaactgtgtggccgagatggtacagtgaagaatattcctcttggccaagcatccaaagggagcccctgagctgccggtaattttcctctggccaagggttagcaggctggggcgacaggagcctactgagagtgaattaggcaggtggctcttagctgacttttccttctatgatcagctctgttccttttctcaagccacatcctcacggacgctggccttgagctcttgtccccgagcctctctctctaggaacttgtccttcccacaggacatcgacacctgagaccctgtgaagcaccccactgaggctgtaccccctggccttcccagccccatcactcatcctggggcactgctcatcttctgaaggctcagagcccttttccttccaacacgacgatgagctaacctggtatataaccacgcggcaaagcaccgacaagctccgctggggctgctccagcccttgctcccagcctgggcacctgagtctttcgaactggctctttcttccagacacaatgcttctgtcctctggggtttcaggtgtagagaaaaggaggccaccctgtgaggttggcgcccggaagcatccgtttaggcaggtgaagctggcagctcacacgggctccccggagcagactgggggtgtctttccccagctccattaactgaggccatgtggaaatcttccatggtgggaacatttacaccacagcagtcaggaaacactatgaatcagagctgcttttctaaagagtcagttgctaaagagtgcccgtggcccagcggcttttaaactacgccacccctccctcctgcactgtgaagtcagattgcagagacgaggctgaggacttcagctttcaggatgggagcagatgaaacctttggataaatactgctatggtttgaatgtttgtgcctcctacaaaattcatgctgaaacttaatccctcatgcaacaatattaagaagtgggcttgggggtggttaggtcatgaggacagggccctcagaaatgggttactactcttagaaaagagctggaaggaaccagtgaggcctacttttgtccatgtgaagtcacagtgtgcaaggtgccaccttggaagcagagaccaggccctcacccaacaccgaacctcctggcaccaccctcgtctcggactttccagcctccagaactggaaataaatttctattcttcagaaatcacccagtctcgggtattttgttatagcagtacaaacagatgaagaaaatactgcatgtctttttttttttttttttttttttttttttgagatggagcttcgctcttgttgcccaggctggagggcagtggcgcaatcttggctcattgcaacctccacctcccatgttcaagcaattctcctgcctcagcctcctgagtagctgggattacaggcccccgccaccacccctggctaattttcatattcttagcagagacagggtttcaccatgttggccaggctggtctcaaactcctgacctcaggtgatcttcctgcctcggcctcccaaagtgctgggatcacaggcgtgagccaccgcacccagcctactgcatgtcttttgatctacctaaaaataagaaaatgataataaggataataaataactttaaaaattaaattggacttccgtcagcagacatcatctcatttgatcttcacagcccgcaggtgaggagagttggggaggccagccaccgagccgtacgggttggctcaggcaggcccaggacctgggtactgctccacggttcctctcccaatggctcctgcagggtgttctgaacgaaaatgggttcccatttaggaagttctttgtgatcctggaatacaggggcgtggtggagacctcgagaattctaaccgtgttggggaaacgaagacgcagaggcagtgccccctgcctggcagccgcaggccctgagacacaggctgcctggggaaaggggcctccgatgcaccgtgctttggagaaagtttctggcagggccctgctccctcccacacggggcggtctggccatgccagctaggctctgttttctggaacttggcccttcccttccgcaggagtccaagcgatgtcaggatgatggtggggaagttcttagtcaagaatctccgtgcctcagtttctccatgtccctattagtctctgtgtctagatggacaggagaccaaaggatggagggtgacaagaaacaccaagtcctgctgtattcatttctggcggctgctgtaacaacatacacacacggggtcttagaacaacagaaacggattctctcagagttctgcaggcctgaagtccaagatcaaggggtgggcagggccgcgccctctctgaagcctgtgggggacccttccgtgcctcttcctagttctgagggtcactggctctccctggggatccttggtagccaccagcgcactcctgtctcggcctctgctgtcccatggcctgctccccacgggcctgtgtcttccatcttcttgggaggctgcagttatgctggattaagggcccaccctgctctaggatgacctcatcttcgctaagtacatctgccagagacgccatatccacacaaggtcacatttacaggtgctgggggttaggacctctctatatattttgggggacataattcaatccgtgccacttgtgcatgctgggcgtgttcccacctggggaagctgctcctgcccagcccgcagcacgtttgccattttccggagcgtgctgtagctaggcacagagaggctctgctgggctgcagggggagcgagacacaccagggaggctgagaacccacaccgcctaaaccgaggggccgtgcacacaggtggctcagtgtctgcagaaagaagcgggaggggggtgcaggggaaccgtagcaccaattacccatagtgggcacatcaaatgattacacagggacagtgggtgtgaaccgggtgggcccaggagaaacctggaggtacagtcccctcacctagaacgcttcttgagtgtttaatggaaagacgcctgtccagaaggtttctcctggaaggagggatcaaatctgtctaagctccgaagtaaccctgctcagctaataggttatttcctcatcttagaaaggaagaaatgaacaggaggcagaagggcaacctgtcccatgctctgcctcgaagcacacgtcatctggtgggcagccctgccattgtggaggtgggcaaaccgaggttcagagatggcattggccatgctcatcaaagcagcccaagctcacactcagccaaggagccccgagcctggattggaacccagatggaccaattccaaaatcctcaagttctacactccttcccgcctgccccacctccatcgtcctgtgtccaggaacatggcccttgtgccccaccagcatccacccgccccaccggcttctgccagagggaggagtcagaggtgagagtctggtgctctgagcgctgcctcgcagttgtgcaaatcagttcagctcagtgagttttaattcagtgtctactttgatgctgaagatctagtccctccccccacagtcactgatggtgtcactgaaagccgagtctgacaacacggaataagaagtcctcgatgagccgccgcaatgtgaccttaggccagtcacttgagctccaaggcacggcccacaggggtacccctgctccccaacccgcaaatgggtggtgagacctgagggactctcaaattcctccagcgatcccgccgtctctgtgcctggccctctttatctgggatcgagccactcacacccttgctgccatctaacttttcttaatggcctggtagggaaatatcacaaaacaaacacacacaactcaaagaaaaaagaaacgtcgcccatgccagagttcagcgtggctctgacattacattggtgcctcttgctgggagaggccaaaaccacaactttccggaactggagtgagctttcctgccatgagagctcactggagcattttgctaagaacgggttttcccagtttgagactggcgagtttggggcctctggcaaaaaaaaaaaagaaaaaaaaaaatcacttctgcttttgccaagcagcttccctttttctggaaactgcccgatccccacctcgctgtgggcaactctgccagcaacagctactcctggctggcccaggctggtgcggggatctgagacgtggagtcgcaatggccagtgtgggcaagcagctcttgtgaagttggccacgcacgtctctccagagtcggctacagatggaaatttccatatgcccctgttcagccaaaatcacaggcttttggtttcattatcattgtcaaaccattaaccactaacccctggcacctaggggagagcgctcctggggccccactctgcatgctggtgagctcgaatgtcttagaagtggatgcttctggaaggaaggatgggaagcctccctcctcatgggtccccctccacagctcacgtccaaaatgccttactctgtatcatcatcgtctatgaaatgtgcacgtcctcactcccatcactgctaaaacactgctcagactcaacttccccaggggagttcacaggagagggagccggggcttcctgctctggtgaagggcttccctccactccctctcagctggagggcagggggcagtgaggggaggagcaagactgaaaacgggtggcaagctctcgcctgtcccgtgcctgctccgtcccatgtctggaagaatgccagcctcaaagcaaaccctcaacagtgctgcttactgagtgacaggacggacgcacaggaacccaggctcctacgcaagcctgtgccctgtgtaaggtgccagctcagaccgaggcactggtcgggggtccctggggctaggggggacagaaccctcaagaatgtaagccctggcggggcacagaaactcgtgcctgtaatcccagcactttgggaggtgggcagatcacctgaggtcaggagttcaagaccagcctggccaacatggcgaaaccccgtctttactgaaaatacaaaaattaaccgggcatggtagcacacgcatgtaatcccagatactcgggaggctgaggcaggagaattgcttgaacccagggggtggaggttgcagtgagtcaagatcgcaccactgcactccagcctgggcgacagagtgagactccatctcaaaaaaagaaagtaaaccctacgagggcagcagcctcatgtgccctccactgctacatcctcagtgtagaccacagacctgtaggggggcatgtggtaagcaccccattgttaatggggccctgagaagccacaggacaggctgagaccatatgaagaaccgccccaggaccacagagatgccaaccccacacgcctgagggtcctataggaacacaatgacctggaagtgctcccatcctacagagagaccggagaggccaggggtgtgcacggagcttctgcccagagccctgcactccacgagaattagcttagatcttgacctcctcctccctccctggggccccgcctctctcctatctcacagcctgcacggccccataaggggtcaggagggaagaatacctgctctttcatatgtgacccacctggcagggccgcagctcaacgggcaaccccaggactggctgttgcagcttggactaaatttaatttcaccctccaaaggtaggggcggctgccttgaatggattccaaggattccaagggtaaacctagtgtctctggactcagccctaagtcactttttactgtgtccctcggagagctcgggacccaggagatgctacaacacttgctcttaaactttttaaaagtaggtgacgattgtgacaaggccaacaaggactggatgcgtgagtgtgctgtcccataggcgcagcaccctggaggaggaggaggggctgcagctgggtcgacacagcaagattccagaaaagagaggagaaagtcggtttcagaaaaggggaaaaaagtcaaaatgacaggtttgtcagaaaaataacttacattctgaaaactcagctgcttaaaaataatttacgtatatgtttttcagatgacaattttgacaattttatatggttgatgggtcagatattacgttgaactctgtgagatgatcatttttgaggttagaaaatagtcaaatatggctcacgcctgtaatcccagcaatttgggaggccaaggtgggtggatcacgaggtcaggagattgagaccatcttggctaacacagtgaaatgccagctctactaaaaaatacaagaaaattagccaggcgtggtggcgggtgcctgtagtcccagctactccggaggctgaggcaggagaatggcgtgaacccgggaggtggagcttgcagtgagctgagatcatgccactgcagtccagcctgggcaacacagtgagactccgtctcaaaaaaaaaaaaaaaaaaagtcaaatattggctattccacgcagtttaacctaatattatcacctgctcttcactgctgaggaacctgggcacaggctgagaaaggatgatttgggctcaaaataagaccttctgaccccaaaccgaggctcctcctatgaaatcatgctgcttcccaccgaaaaaccaaaaacaaatagaatccaggccccctttattctacagacaaggataaccttggtgttgaggtcaggcctgtccacccgctggggacagctgggtcattcaccagcagcccaaaggcaaagcccactcctgtcaccccagccagcccttgctctgcagtgccagcaggcagtgcccatcacgggccagagagaagaagcctccaccccgactgctgttgtttatttctctaaaaaatcacattagaaatgagcctccaaggagcttgacttgaacctggaactttctaaaatgcagagtatctatgcatctctatctacatgcatgcctcccttccccccacacacatgcacacacacgaacacacgtgcacatgcacacacacgtgtgcacacataacccttctggacttagcagcacacggaccagctggatgcttgtggggcctgagggtggacagctcctccacgccatcagggctgctgtctgagacctgcccccaagagcctctggccaggacgcagccttcccccacacatcacaggcacagggaggcatttggagcgcccgaggatagggctgtgtgacatccctggcaagggccaggcagcgggaatccagccgccaaactcgagggcctcatggaatgctaatggctacggacagcactgccacaggcttgagtgacatcacctcagtttgcacaattgggctgagactggagctcagccttcctggctcccactccttgagctcagggcatgagtacggccacagaatcagggtgcctggtccttagggcgcgcctcctgtgattctcacacaacggcctcaagaagggaggcagcgggggagtcacggaaggagggctcagtcaaagaaaggacacatctgagcagagggatggcctcgcagcccagttccaggatggctgagggctccatactccagggctggagctggggaaagcacacacaccactttacacacacaccaccctccaccactctccacataccaccctccacacacaccatgctccacacacaccatgctccacacacaccaccctccacacacaccatgctccacacacaccgccctccacacacaccatcctccacacacaccatcctccacacacaccatcctccacacacaccaccctacacacacaccatcctccacacacaccaccctacacacacaccatcctccacacacaccaccctccacacacaccaccctccacacacaccaccctccacacacaccacgctccacacacaccgccctccacacacaccaccctccacacacaccaccctccacacacaccaccctccacacaccaccctccacacacaccaccctcccacacaccgccctccacacacaccatgctccacacacaccgccctccacacacaccgccctccacacacaccatccacacaccaccctccacatacaccatgctccacacacaccgccctccacacacaccatcctccacacacaccatgctccacacaccaccctccacacaccaccctccacacacaccgccctccacacaccgccctccacacacaccactttacacacacgccaccctccacacaccaccctacacacacaccaccctccacacacgccaccctccacacacaccacactccacacaccaccttccacacataccactgcagacactgggatgtttttgccaagcagagaggctgcaggcagagaggcatgggctgtgccataggggaaaagtgggtgggtgggggcaggcagaggggtgggggcggcaggaaccacagggatgggtagaggctcagagccacacctgctccagaccatatggacctcacagatgagtctgtgtcctcgcttaggcgaaagctgagctccatgatgctatgtgcaccctgtctccatttccaaaaggatgcttgcaatgcagttacataaaataccttgaaaggaggaaaaacagtagccacaggaagataaagtaaggcggtctctggagagaggttaagacacaaaaacccgtaagtcctacacactcgccagacacaggccacacattctgcccttggggtttctccagcaaatgaagaaagaagatttcttaaaaattatagcatactcaagtttgctacatggcatatcatggcaaacctacatagggtatcatttaattctcatggccacctgcaggcaggtattcttattgctgtttcactaacaaagcaacttaggttcagggccatcagggagcctgtccaaggtcacacagccaatgagaggtgtggcaggagggaaaccaggtccccaaagtcctggctccccgtggcgatctttccaaggcccgcgcagccgaggacgcaagcacaggtgccacgagcacgctggagtggccccgaggcgggcccctgcggaggcttgcagctccctggaaggtattttgccttcttcattgccccaaattaggatgtagggggagacgaaaagacgtcctgcagggaagggcgtggattttggagacagccacaccgggttcaattggcctcgccgtggcccttaggcaaacaactcattctatctgagcctccgtttctccaactgtaaaaaccgggtgaatactaggaacaggcagagttgctgatgagttaaatggcaaaatatgtgaaagacgttaagtctggcacccacaccgaatataactcagtgaatgcccgcatctgaaaaacaagaccagccacacacacggtcacggcgtccccaccggagcacggtcacctgtgcctcatcagccacgtggccgccacagggaagagaactggatcgcaaggcaggtgtttcaagtctggtgaaacccagctctaaggaaacaagataaaggaggagaagatacaggacagcaggcagaagacaacaagaagggcggagagaaaacggagcagagaaagaggaaagaaacagaaaacggtgacaaaagaaactactggactgcagcccaaagtctactgctttcagctttgtgtaaaaggtggtatcttttagggctccagagacactaaccagtgtaatttttgcaggcaacattaaaacaaaaaaacaatcctaagacccatctatttgcaattaggcaagggctgatcattgctggaaaaaaaaaaaaaaaaagcccacagggagtataagggatgggcacagaacgcgcagcatcctgcggaagacggtgtgggagatgagagccagaaaaggtcagtgctttttgctgggtgacattcaggacctttctgctcctgccagctcccagctcccagatcactgagccctacagagttctgcacaaatgaggaatgaggccgatgcccaggtccgcctgtgagagggggctgtgcccaaggtggacccatcagcaactggaagtaccaaaaaaaaaaaaaaaaagacttcatataaatgcatctatagtcagcctataaaaatggttggaaagcaacagcccactcctctccacgcattttctcgggttgcatgctgccttccggcaccatctgtctgttcagcacagcggttgtgtgtgggctcaggcgccagacggctccggcttgatgcccggctgtgccaccccctgccaacggcctctgctgtgcagattttcccatctgtagaatggggacaatagcagcaccagcacacagctgtgtggggatgaagtcagctgccacccacgcatgctgaggacctgctggcttgggagcgctcgctctctttgtggtcactgttgctcttcttttcccttcaggtctgaactgaaaagtcatctgaaccaggtgccacctcgctggagcatcagaaggcgggcatacaatttctaacaccttctatacaatcccaaacggtgatttcctgtcactaggaaggaatggggcataggagacaaagaattgcgggttttactcctttggctgctccctaaggggtacagggtgctgggacttgcctctcccatctctctttgggaatgaagcgctcctttcccccactgctggtggtgctgtggcccctcggctgccagccccttatggggacagcccaggctggaggagccaccttcccaaggccccagcctcttccacagtcagctacatccaccaatgattgtccccagcccctgctgctacccagcaaggctcagaagggtgggctgaggccctagctgagactgtggggcagcccagcctctcctgcaccgtgcctacccctcccctcccctcccttacactcccctctcctccccagtactcagcagcaccctgccagcctcggccacagctgtccccagctggcccattgaagagcccaatctgtaccacttggtgggaaggtgactgaagctactggctccttggagctttaagcagtatggagattatttttatttttgtttatgcataccttgtgtcactttcggtatccaggtgtcataaagatacgtgtcagggattggactaggtaagcctcagtggatagttaaatacccatatctcccacaccccattattcccctccactattcacctgcccacacacacacaccacccctgtgctacaggaagagagagtcacagggaaagggaagtcctgcctcctcaatggtcctggaccatggccatgcctgacaccattgctgctggaagaaggggtgacatcgtcattcacttcggccgtttctcggcttcctgtgatttgaaagttttccagtgctgagatgggtttggtttgagcccccaatccaaagatgctttgctggtagctaggaggtattcagcaagcacctgctatgcagaatgcacagtgtggagcacttggagggaccataaagatgaacggaacacgaattctgcccccaggagtcttgatggagctgacgggcaccctaggccttgtctcgcccctaggaggcccctcttcctgctcctctgcaaggctggcatcgacagcaggtccagccccatccctggcctcagtgactcaaggggagttttcagaaacttctcagatcaaggaaagctcagaaaatccagtgtctcctgaggagaagccagaccctggccaggtgtctctggagtctgtcacagaacagattcaggaaaaacaggtcgctggggcctccagcaaacagccgataccacatctgtgtgcatcgtcctgtgatgcccagggaatgggcttcgagggtgctgcacagctgtggcaccagagaacactccgcggggaacggcgtcagacggggcggggcgaggtgaggcccgcaagccagtccctgctgcacacggtagcgaaggcggaaagctgcggcaacaccttcccaccatctctgtgaggtctgtgggtggagagggtgggatgcgactgccagccccgtggaaaggtatgattctccaaagaagacaaaggtgctggccaggaatcatggtcttcagagtgagggcagcgcccagcacatctctccgtgttcactgagacacagctaagacacacacttaaagggccatgggattagcgaatagggaagacttcccaggggcgaggactgtgagagtggaggtgagtaatctggcggcagctgcctgaggctgtgtgcccaagcccggctgggtctgctgccagccacagcccacagtgccagagctgtcccttggcgccatcagaagctgagtggccttggataccttcagctccccttctgctctcatcagccacttgccagccatcctcttgtcccagtgagagctgcaggttaaggcaccgaggatgtatctccatctctgtccagtgccaagcagttgaatgatctggtaaacagctgtccctcactcccatttaggcagtagtcatctcagggtatcagctggaaatccaaggccatgggagtcacctgagtccatgccgctggagggacgcagggttgcaggacacgagtgcccatcttctgatgtagtccaagattccctctccgccacctgcaggtgggactgtgggctgggctgacggaggtggccgggcacctggagctgtagcaggtatcacagaagcctagaatgctggacccggaggggcccttccagtcactaacagggctccatctgcctatcggatgctttcatccaccttccattaagcacattaaccagcagctatgatatgcccagccactgccccttctccagcctccgtggagcccctcctgctggaggcagggcagaaagggggcaccaggacaggccctcggacaggcaagaccacaggctgggcatgctttgcgccatttgcagcagagagaaccagaacttcttgcaaacatctcactcctccaataccacacacggccacctgcatctctacattgcttgtccttgcccaccccctctcctccctggcatccacgcctgtactggtggacaatcagagacacgcactgatgggtgccatctgtggtgcccaaggcctcgcctgtggaagggggtgtgggtttcatctcccattgggaatgaaccaaccacaagacagagagagagagcacggcccccagctcacccaccccacccgaggcccactgcagactggaaggagatgacttgggagcctgagtgttctctaaaagccccatatttattttctggagtcaaggtgcaaagtccccatgagttccccattagacagcaaatgccccaaggagaagaggacaaaaagcatattaacctgatgaactgattcccaaggatgcctgctgtgccctacctctcctagagggcactgttctcgcccagggaacactgtctccccttgtctgcccacctgtcttccatgccatgaccctactggggtcacgttaggcttgtggtagagggaggtgcaggcagacgagactccaaggaccctaaagtcccagtattctgcttctaggtagagcttgccaggttagatttctgcccgccacctcaactctctgcagccccaccccaagactttgccttcaagttcctggcacgtggaccaaggccaagcccatttctaagccttctcactctcagttaagggctcagtaccttcagccctgggggctcaagctggcttcactctggggtcaggaccttggcctgtctcagtgtgaataaggagacctattgaacaaatttgcaaattattcagccaaagcctaatgagggattaaaaaggaaatctcgttcaaattacaatcaaagaatcacctgcaggacgggcatggtagctcatgcctgtaatcccagcactttgggaggctgaggcgggtgcatcacttgaggccaggagttcaagaccagcctgaacatggcaaaacttcatctctactaaaaatacaaaacctggccggtcatggtggtgcatgcttgtaatcccagctactggggaggctgacacataagaattggttgaacccgggaggctgaggttgcagtgagccaagatggtgtcactgcattccagcctgggtgacagaataagactctgtctccaaaaaaaaaaaaaaaaaaaagaatcacctccattgaaaagaataaaattatctgaagctggggacatccccagaaaacctgggatgggatggtggccacagctacattcttagggtcggtcctcccatgggcggcttgttagggagagggaggcaacccttctagacacagacatcctgctctttactgtggcatctcagtcatgctcccccaagtcctgtgaggtggggattatattctgtattttaccggtgaggaaactgaggcttagattgtgccagtgaactgcccaataggacacagggggcaatcattgacaccggggttgcgaccttggcctctggcacccaaactcatgctccctccctagcagccactcttccattggcaagataaaaaccatcccatcttcctgctcacacacaggactctgttcttgagaatctagtatgagggacggctaggtccatgcccgtcccctcagtggacggatgctccctcctccaatggcaccaggaaatagagaggtccctgaaggggatgaggcccgaggcactggcatctggcccccgggctctgcattgcatgaaggtctaggcgcccggcccgtctccaggcagaggaccatcccgccatggcagatgcctcctgccagacacaggatgctgtactagtcaatcagcctgagccaaagcccaagtaactttcccaagtgggaggtgaaggaaaaaaacaaataacacagtaatgtgcctaaaatctgccccttttttttctggccagtagattggatggaaaaaaaaatgcctctttttgaaaccaacaagacatgatttgtctgaaaatgttctctttgaggtatgtggctcccacaagatttgtaaaaaacgggttcactcagatttttctaaattgggtcgtcgagttaactaagcatttccattctcaaagacggcccccattttctttctttccccctctgttagttaagcttctgcatgtcctcaccatcatcatcatcattgtcaacattcaggtcggctgtgtgagaggtggcttcctcagggctgggacatgacaaagtgtagacgcatgccatctttaaaggagcttatggtttaattaaggagacaggctggatacttcgaaagaaaaatcgtgagattttatgagaaagggacgcggtgccgtggatgccgtggtgtggctcccggatccccaggcgcagggagcactggtaggtccccaagtgcagggggcactggtaggtccctgggtacagggagcactgttaggtccctgagtgcagggagcactggtagatccctgggttcagagggcactggtaggtctctgggtgcagggagcactggtagatccctgggttcagagggcactggtaggcctctgggtgcagggagcactggtagatctccgggtgcagggggcactggtaggtcctggggtgcagggggtgctggtagaccccaggtgcagggggcacttgtaggtcctggggtgcagggggcgctggtagatccctgggtgcagggggcgctggtaggtccccgggtgcagggaccactggtaggtccccgggtacagggggcactggtagaccccagggtacagggggcgctggtagatccccgggtgcagggggtgctggtaggtccccgggtagaggcagcactggtaaatccccaggtacagggggcactggtaagtccccgggtacagggagcactggtagccactggtactcagctgagtgcctggctgagacttgccctcacccgacgggatccgcctcacccaagttcacatccccttcccagggacagtgtgggagccctttgcctcaatctgggacaactctgaagggtcatcccagttccagaatgctccaaggggtcagctgaggcctttggtgtgaatgcttcatcgcccttcccctctgctcagtccagcttgcttccctctttcaccactgagtggccaaagctagaggcacagactcaccagctgagcataaccttcaggtgaaggtgacaaaggccactggagggcagaccatcatttaacaaggaatagaaccaaatatgaggccagcacggtggctcacgcctgcaatcttagcactttggaaggccaccgcaggaggactgcttgagcccaggagtgtaagagcagcctggcaagatgatgaagccccttctctatgaaaaatcaaaaaattagccgggcttggtggcacctgcggtcccggctactgagcaggctgaggtaagaggatcgcttgagctcaggagttccaggcagcagtgttcgcaccaccgcactccagcctggactacagagcaaaaccctgtctcaaaaaaaaaaaaaaggaaccaagaaccaaatatgtccacctgcctttatgctgtattttatcacagtagtaaactctatgcctgcatgcctctcctacagaacatcgctttgagcctttcctgagaactgatattgccacatctagaggagaggagagaggagggaggtgatagagaatggagtctggagcccacagcccttgtcttgaaatagcacgaaacaagcactgctgtgaactggcttcctgacctccagcctcaagagcaggcatctcaggcagaaagccacagggccggcagatggcaatgctggctcccagaagcccttccctgaccgtagccacagcagctgaccagccagggtgggactcctctcctcccaacacgcctccagtgcaaaggcccaggttcaatccttgcttcgccactggccagccatgcgacgtggcaggtcacttaacctcttggggctgtttcctcattatacggcggtccagggtgcagcttcctgtttcccttctcccaggggctaccatgcatcctctgcgccacttccacacctggcaggtaccctgcaaccctagaggggaggtctcctggcccagttccttccccagaccaggttggtatcgctgcccagcatttccctctgtctttgaaaatactctattacctatgccccaaggtcatgtcagaaatctcaaaatacacctaacatgcaaagcagagtggtgaggagacaagcgacctctctgttctcctggcgctggcagctccccaggggtgaaatatctcctcggacactcactcatcttcagtggtgcaaatgggagggctcaggtgacactcttaaaagtccagctttggaaggacccaggccccatcactgctctgcacgcccctcacccacagccccttaaagccacttgtccccaggacaaagcagtttccatacagccgtggtgcttgagccaaacggagacttaggctccagccctctttttcaaagtgtatatatgtatattacatattacacatattacatataggatatactttaaatagcatatgattagataacaattttatataatactaattatataatatatgaatgtattatatatgtaaacagatctagacaggttaagtgactggttccgctcaaatccttctggcccctgtgcacatgaccttgctttccatccacaggcagagtctgtccctccatcccttgagtctcagccgtgtgacttgccatggccaaggggcctgaggagcccctgagcttcaggctggccctcttgctgctgcctagacggcctgctggacacacggcccagttgtccccgcggctcggctggcatggagccgactgggcgatgggcagacatgcaggcgaggctgtcctggggcccagctgctggctgaccccagagatcggccaagccagccccaaccacgagaacttcccagctgacagagagaacagtgagaaagaataaattctgtggctttcagtccctatgtttttggtgttttggtagcagcagacgtgaactgacagggtgacggcatgccccaggttaagccttgtgaggggagagaggggcccatgtggatcacagtgagacccctgtgcctggcacacaacaggctgcggtcaatactggatgactcagtgagaagaagcccctagacaggtgacagaggcgccaggcagggcttcctgattccgagtgtagtgttcattctaatctccattatttaagaagcaaaaacaacaaactgagaaagaagaaccagagactggaacctatgaaagtggagaagaggccgggcgcagtggctcacgcctgtaatcccagcactttgggaggccaaggcgggcggatcatgaggtcaggagattgagaccatcctggctaacacggtgaaaccccgtctctattaaaaaatacaaaaaattagctgggtgtggtggcgggcgcccgtagacccagctactcgggaggctgaggcaggagaatggtgtgaacctgggaggcggagcttgcagtgagcggagatcgcaccactgcactccagcttgggtgacagagcaagactctgtctcaaaaaaaaaaaaaaaagaaaaagaaaagaaagtggagaagacaggttatttatttttgagataagaagggtaaagaataaccttcaatgaccttcatctagaaaggggccaagtgaagcgtatggagacctgacacacacagggcaaaccgaagggaggcagcagacgccgccctctctgggcccaccgtccagcctcagcctgaccgtccagcctcatcccctaccccagggaggccttggctgctcgtggggcatctgggccatagccaagcagagatatcaaaaacctgacaagacacaacagagacttttctcagcaggttgggctagaatggttgtgaaccttacactgtcttttctacattaaggataataagactaataacaatactaatatttcacatattactttagagataaagagagacggctcatataaaagcacacgtctggcatataacaagtgcttcagcaatattagctcaatctgttgaaaaccatgccaccccagatggtatctgatacaatcaagaatattgatcggtcatcagcaccatgaatgcaactccccatcaagcgtatctaggttgcatggaggaagaaggctctctggggtgcttattacaacatatgctatagatgaggatggggcccaggtgatgtatgcttcaagcccaccaccccatggctgctggcatggctgaggtggtgagcagggtggagctgagtaaatggtttccacattagcccaataggcaaatggctgtgtggagcctgcctgcctgcccgtcttctggaagttgagcaggtgacagagctgtcctcccacccccacccctcgcacacacctctgcacccctggccccaggaggctaagtcttggtggccacccaggaggggagagcaggcaaagaggaagtgctctggacagagggagcaggcctgggtcccagagctgccacaccagcctctgtcacgttacgttggttttctcacagcccctccacactagaacttccagcagtgggaggaggggacgcaaggaaagacccagaccttggaagggagtgtcaaagtgctgtgggcagtgggacgctgggaccccttcctggggccttggccacctctccaggccatgccatggagcccctcagtgcaagcccctgccctacagctctatcggacggaggctgtggctgcgctgtgctttgagggcagggccctgttggattaggttcctgggctgtgataatgcggcaccacatactgggggctttaaaacagaatggattctctcattgctctagaggccagaggtctgaaatcaaggtgctgtgagagccacacgccctccgaaacctccgggaggatccttccttgcctcttccacccttcagcggcccatattccgaggctcgtggcagcagctctgcaatctctgcctccgccctcacaggccttcttgcctgtgcctctggatgcaacttccctcttcttagaaggactccaggcatagtggatgagggccggtcctaatggcctcatcctaatctatatgttaatcacatctgcaaaaaccccatctcaaagaaggtcccattcacaggtatggggtgcagagggtgtgggacttcgaccttttttttggagaatccaattccatcgcactgttcatctttgtgtcctcgacacccagcccagtccctggaaagcacacagaaacgagttgactggtttctggtcccagcactaaccctgcgtaaacatagttcttagcaatggctctctatttctttattcacaagtggagaatttgcatcctattttctcaaattctcccctcaccctgttgcatccttcttcttcccctccccagcacagtggaggtcactgcagggccacccccagcaatgaactcccctggaagaaggccagcagagctgcagggcacccccctccaggaccaggcctttggctcatggaaaagacgctgggagcctggggttacggagcaaactggtctttgtcgtgcattcatcagcagcttcactgccaggtcagagtatatcaaaacacagaggccctggcagacgccccaaagcctggtgatagccgattggtccgtgaccagccatgggttggcagagagggcttcctgtcaacaggaagtaaaggacagggattaaattattttcaaagtaggtagtggaagaaagagatgagtgagattccaattaaccattccaaggcagggctaaaatacagttccaccaaatcaccttcttctactggggaagctcagctcgttaatagctaaccccttcctctggtctgggggcataagccatgcaatgagtaacagtgggggcttctaagaactccgtatggttaagcccgaaggacgcagctgaactctcaggtggcccctctgctcatctcagagcgagtcacggttaaagaaccaagcaaagtcaccactctgtttcaacgtcacagctcagctgcccatcggcctttgtttgttgcgcattttaaacgacgttgacagaactgtggggttatcaggatgggctggttcaccgtcctgaaaggacggcagacagctggtgcttcatcggtgatcacgttcattggtcccattttggccgaagggagggcggagggaggagaacgggtgagccacattctcactcggctcctgtcagtgtctgtggctctactcggtaaccttagcagcccccataaatgtaaaaaggtgcctagaaacagaaagacactggccatgagctgaatacaccaaaatcagctcttataggaaaacagggagagcaaaagaaaataaacagccaagaaacaggaatatttaagagcacatgtatttgcctgaaggttttagaagatacaaactgatttacaaattacgtaagcgaagtctgagtagatgaagaggcgttggcaaataaaaagtgcttccaaatgatttctttcgccagtctagtgttcagcacagtccaaattgcaaaccctgagtgcaaactagcaatattgttctgagaggttttattggggggggcagttcaaagaaaagaggcaggaaaagacactagcaatgcactgagactcctaacaagtttgtgacatgtgaaaagatgcaatatcgattgaacccaccaactctgctggctgctgcttctgtttatgttaattcagtactcgagctgggaaatcatgatccaggatttaactctttgcattcatcagtaggctgctcctctgcagtatgtagagcctcgtttatataagaatcttggaaccctccacaaagaggtaccaggaccaagcgcgaatagggcagcgggggctagatgagggcagagatgcatatttcacctccactgtaattaaccctgtcatctaccatgtaatgatgaacaggctttttctcagctgggcatttgtgaagtagggataagaggacgaggcagctccaaggtgactcccgcaaggcactgagcatgtgactctgcaggcccatgggtttgtgcaggctccgcactattcccccatgtgagctgctctgtgggtgtccctgcgccctctgtgtggtagagtctttgaggaagtgatcacgcatcactgtctagctgcccgttccctccaggaccagcactgggccgtgctcaagcggcattgggccaatgtgccgtgccccactgaggacgaccctcgctgatcagccctctcacacccagcgtgctgcagagcggcaaccaagcttcatcaaaaaccctggagccacaggccagtctgaggaccccatcaccaagaagcttgactactgaaggttcccatagcatactctgggccctattggagcttacggcagggcatctaagatgcatgaagccactgaagggctgagtcaagaaagcttgcagcgtggcctaacgggctggcccacacaggcagctctggctacaggctggtttgggcattcatctttatttggaagccaaatgttgaattgcctttgttgaatagtcaaaagtcaaggatatctcttctcaatgacagctgaaaaggtgcagatgatagatagatagatagatagatagatagatagatagatagataggcaggcaggcaggcaggcaggcaggcaggcaggcaggcaggcagacagaggaataactcatgggggcagaagaaatggaacagtattacaccagggaagctattaatagtacccagttgtttttaagccccagtaggtacaagaatcaccggagaacttaagaaaaatgcaaactcatgggtcccaccctcaggcattctgattcagtaagtctgggctacgaagcagaattttatattctaaacaaacactgggagcttctacataagctagtccatgaaccacactttgttaaacattgccctaaaccctaatccagcaaatcttgctcaggatggtacaaactggccaaggtcaaagctgacacgtccactgtgccacacagcatcccccttccctttgcggaggcttccatccggagcgtttcagtggtgtgaggggcacaaagcactgtcacggttcgatcctccagccccggggcaggacggggctccccttcccaccctcatcctggagttcccaaactggctcattccagccggatagaggctatggggcaggagctgggtgcaaaggtcccaggccatcaccagctcggagggtgcgtggccttctcgcagcgcggggcttcccttgaggccacgcggcggggggaggcaccgctggcaacaggcccgcccaagcccagccccatctctgcaaacgttgtgactgcccagctccctggctctacttttagtttgtctccagcgactgtgcaggctttctggagcacctctccccagagggccagcgacatgtacattctgacagaaatgccccactcagcagcaaccatctgaactcctccagcctgcctcagtgtccccaaagacttctgccttgggtccatctctctgacgtcttccctctccctgggtctccagctctgtcattggcttgaaacagttccagagacacacgacatggcagccagccttgattaaagcatgtctatggggtctatgaactttagcactaatagggaagctgctttttcttagaccgacataagggagaaagagcacgcttgctaccaaagtctcggcagaacaccacgcacagctacgcttccagtgagttacttcctaaaaccattcccatcaccttcataatcagccatgccttacaagaggcatggaggctcagagcagggagccaaggcgggatgccaacaggccaggactctgacctctacggccctttgctactttgaaaggccagcatggcctcaggatagaatgtgccgtcagtccttccccttcctctccattgcatcctccccctcctcctccaagaccctggagctgtgcccataaaggtgacccaaaatgcccaagaaaggctgaagccaagcaaggcgacaccttcgttaggtccaagggccacgttcccttccccagtacacagccatcaaccgaattcaattgataaattacttagtagttctaggtctccaccaccgtccactacccactggccctaggctgtcccctaaaatggattcttccttcctggtgtcccaaagcctagatgggctgttgacaggaagcgggcagtggggacattcaaaatcatcagagcccgagagaggaggtttgcaacaattgcctccaacaccctaggccacggttctgtttatgatatgggctggaggctgaggtccccaaaacgactcaatccaattcaatgaagagacaagctgcttgggcactaggggtccgaggaggccaccaaatgaccccagtcacaggccagccagggccacagtgtctttcaagagttattactcctcagaatccaagatgtccttggcagtggcagtccctgcacaccacagtcctctgaggctggggtgaggaagcaaatgtgattccccatggacgtgctgccctctgctgagacacacccgggctatgaccagactcatcatttcccccaagaaccggccccttatcccaaatacctccacatcagttcctgccacctcaaccccttgccatccactaggctggccttctcacgtcccacgtctgcccttctgcattctctcatcacagctgcagttcaggccctcggacccttaccctgggggggggcttttgccaaagtacttgagttggtttccttgacaccagcccgtttcccatcactccactctgtacacttttccaggctgattcccatggaatgctgttttctttacctttaatggcttcttagttcaggtccccccagaaaagacactcagacaggaacttaggttcaggagtttatcccagggagtgcagacaagggaatggggaaactgaggcaggaactggccagaagggccagtaaggtgcattaacgagtgggttacactgtggatccccaccctgctagggatcccctgaggcatcctgcagaacccaggtcagaacttcccactgagcagcagggcggctgggccattggccaccaactggacccctcctgggttgagggttgcccctcagggcataatcccagcacttccaggggttcctgcactaggctgagcaagctgccagggtctgagaggattccttcaggtggggagggagacacgagtaagaggcagtccaccaaggctgcaggtgagggtgggctgggccccaggcaccaggaggaggctatccacagcgtccaccgcagcttcttcacgccttcaggagggggtcctcacgccttaggcctggtcttcaaggcagcattgccagatcaaatacaggacgcccccattaatctgggatttcacatcaacaatggatactttttagtatttcccaaatattgtatggcgcatacctatgctaaaacatgattcattgtctacctgaaatctagattcaactaggcatcttgtatttttagttactacagctggcaaccctatgtccaggtccttcctgatccagtctcaaagcatttcctatgactctagctctcaaaccctttcgccaggaggcgtggctcttcacctggaagcagccatcccctcccgcccgattctgtggggtgctcccactggttccttagtgggagtatcacccccacttctacgtgactcctgcctgccatctctgggtgtaaagtctctctaaacacatcaggccactgtcatcgctccttctgcctctagaaacaggtgtggtctgcactggccatcgtatgaccctggatcatttgctagcctttgtctgaaagcctcattttcccagcgaggttataactgccacctagcctggcacaatgatccataggtaatgaccattaggcagatgaggggacctccctggtacccaaagcaactgcaagccctgtgaggacttgggcagatcttccccagatctcaccctaaccagagcctgggcacgtggtcaccctcagccactgtggaataactgaatgaatactactttcgcggtgggctggctcatgccaagaacgttatgaaaagctgccaaagtcaccactggcagcaagaagggtggtccgaggaccccaactataacatggtttttcaacgttcacggcctggcctcacagtcctttttctggttctggattttgtctcacactatcgctggcaccaccccacgggcacgcccacacatcactcacaccctgcatttggaaccagcctcagcatgtggctgccacacaaaatggcccaaccactggacaatggcatgttcttgtttctctctatatatttttttaaaaaactaggtgtctgatgtatatgtatatgtatatgatgtatatgtatatgtatatgatgtatatgtataagtatatgtatatgatgtatatgtatatgatgtatatgtatgtatatgtatatgtatatgatgtatatgtatatgtatatgatgtatatgtatatgatgtatatgtatatgtatatgatgtatatgtatatatgtatatgtatatgatgtatatgtatatgatgtatatgtatatgtatatgtatatgatgtatatgtatatgtatatgatgtatatgtatatgatgtatatgtatatgtatatgatgtatatgtatatgtatatgatatatatgtatatgtatatgatgtatatgtatatgtatatgatgtatatgtatatgatgtatatgtatatgtatatgatgtatatgtatatgtatatgatgtatatgtatatgatgtatatgtatatgtatatgatgtatatgtatatgtatatgatgtatatgtatatgtatatgatgtatatgtatatgtatatgatgtatatgtatatgatgtatatgtatatgatgtatatgtatatgtatatgatgtatatgtatatgtatatgtatatgtataagccatacatttataggacactttacacttgtcaagagttttcccgggatgggtgtgatggctcacgcctgtaatcccagcactttgagaggtcaaggtgggcgggtcactcgagcccagctcatgtggaccagctttgggcaacatggtaaaacctcatgtctacaaaaaaaataaataaattagatgggtgtggtggcacatgcctgtagtcccagttactcaggaggctgaggtgggaggatcacttgagcctggggaggttgaggctgcagtgagccatgattgcaccactgcattcccacctggggagcagagtgacaccctgactcaaaacaaaaaaaacaataaaaaagagttttcccatgaattactttatttcaatatccgtataaagcaggaaaaatgggtattatttcctgcatttgacaaatgggagaaacagtagttacacggttagctcaagtgatcactgtttaagaggtttgtggcagcaacatctaacttttaactcacgaacatggttttaaatgtcttacatgagagatgtaaacaagaatgtttcattttcaaatagaacacttattcctgcataatcgagtcaccaccgtgggggccacacagcagccaggggtccaagtttccagccccagagctttccagccagggagggctggcccagggcccctgtggggctacttggcatcaggtgtctggagacccgcccctggactccaccctcttcacccaagcgttaggcacgtgtgggccggagtttacacaggaggaccttagcggggcgtctaaaagaagggtggctcagcaaacacggggcagtgcgccctgggattcacagtgggaagtgagtggcctgcctcggccatgccagctgcgcctgaccctgtcgggaaggattagctttaatgaggggtccggacagcccattcactgcgcactcccaccctgccccgggagagcaaaataactttctctacggagcactctggtgtgtgtgtgtgtgtgtgtgtgtgtgtgtgtgtgtgtgtgtgtgtgtgtgtacacaaacatttacttggttggctgaggcggagggtgtgacccagtgggccacacctcccaccgccctaccccgctacgtggaggcgaggaacagtggccgcgggctaccggggcgccttccgaaaagagaaccactacgcggcccgccgcccctctggctggacaaagtgaagccgcaggcagatccgagtcgccaatgtcctcccgggcggctggcgcggacggggctgaagttcaatgcagcctgcacggattagggagctccgagcccccaaataccacagagacccaaagtacactcccggggcgggggaagggaacggcggcagaggagacccccgctccaggcccagaaacgcccggagagaaactggagcggagggggtgcattggaagacgcagctacacagctccccccaacccccgccccgctgctttccccacccaccgcccctcccctctcctccctcccctcccctctctccgtctccagcagccgagcgcgggctccacctccccggagcgcagtccacaccgtcccttttcagcaaaacaacacaacgcaccgccccccgcacccgcacccggctggataccgggctacgcccagccgcccacccgccgcgcccggcgccccctctagtctgcagccgcccagcccccgccccaggcggagccccagccctggctgcacgcgggcagagagagagattgagccccggctccgccagcccagctcgggccctgtccctctaccctttccccaagccgcccgaagtgacaggaggggcacgcacggcgcgcgcggggcgtccagcgttaaccgcttcggcgccggggacgggagcgacaggagggctggggagcaggggaccgagtgctgggactcaccggaatgtgcacgcgcagcgaacgcctcttctggctggcatttttcttgccgccgctcccgccggggctggaaacatcttttttcttcttggtgtccataaccgcgcttcccataactctaaccagaagttgattctgcgaaactcctcgggggttcggtcccctccttccctcccccggccgctgccttcggactggagccgcgcgctctgttacaccctgaagccacctcgtggggacttccgcggagagggagggtgagcagggaactcgcgcggccgccgccgccgccgaagcgccgaattcaagcgtcctttcctacggaaccctcgtaggcaaatcagtcaaagcccgtcccggttctggtgtctccccgggttactcgtggctgaggtctcccgctgggtgacaaagttttcttccttttgcaaagctaagaaacattttccaccctctcggctcctcccacagattcccagaggtaatctgaaaggcaggtgcaattaaaaccagcaatttggaaaacaagcctcctatgcctgtgcccaagtggggaatctggaaccagtaagcccgttcgtgcataaatgtaatcctcggccgcagaataaaccagctcggagcctgcagctgggtccgtcctcctttctgggcgagagggagggcggcgggggaagaggaggtgcaaggcgagccctctgcgcaattaggctacgggcggccgctggcagaagttctggcggcggcgctcgcggccctgcgcgccggagggggcgcccggagtccagcgggccaagaagggcagggcgcccgctcctcgccccccgccgcgccgcggccccaggggaccgcaaggggacagtgaggggccgggcctggcaccgacgcaagctcggggagcgcgggtggtgggaggcggcgcgtgttgaacaggaagtgcgcggcgtgcagcgccaccgtcccgctccccgtcgccccacgccgccctcgtcgccgcgcccagacccctgcggcggccgcagccgcttgggactcgctgcgagctggtttcggatccatcccgcctcccggcgtctcactgtgtgccctaccctttgaaacacgcccccgcgcccgccctgccgtagaccaggcagcgaggaagcccacagtctccgggggcgctgcgcgcgaagtagcacgtgcttctcgaaacaccgcagcccccgggtcccgccccgcccggcgcgcgcactcgaacccgcccagagagcggtgcgtggcgctgggtgcgagcagggtctagccacccccaccctcaccccaccccaccccaccctgcttttttcaggttcatcaaggtttgcgcagtggatccgcggtaagtgcgtgtccccacgccgcgggaaacgtggggctcctgagactgcggaaagaattgggagaaggggagggctcgaagacccgggcgagggttcccggtgcggcccaggtcctttagagccccgggtgggcatccagtaccgcctgctgccgagggccctagaggggttgggggagggggctggtgtgtcccccacccccagatgcgccccaggatggcgcgacctcggctccctggtggaaagtagggggagtgctggcttgggggtcgcttcccctcctgctctagtttctgaggatgtgatgaccccaaaggtcattggcgctcccagaatgctgacgtcagctcagccgctccgagtaatcagtaatgcagggaggccacccgcagaaagaacgcgacaggggtcgctttggggacaccatagggcctttactccttttgaggtgcgtgctttcgcaggactccctccccagaggaggaggcatgatcagcccacccaaaggatcatctcttaggaagcaggcgtgcgcccacgcagggagaagcatccttcctttcagctgcttgccgggtggcttttccaacccgagttccagcagcttgcacaaaatccttacagcttgggtggttccctggctcataggggtgggtttatattctttctccttctcctctgctctctggtccagaatgaagccagcctggaagatccccagtctcgagacagagcctgacaggggcagatgcactggaaggaccctgtctgggtttagcaaccaagcagccatcctggccccacaggtgtgggacttctgggtcttctcctggctggcttcttgctagaggatttcaagagacc

SEQ ID NO: 482 - DNA, 510936 bp, Homo sapiens
  source 1..510936: mol_type = genomic DNA
ctcgtaaagtcgttttggggatttcgtgaatctggcaaataaaacaaaacaccaatgaaacgctgagaaatgattatttcccttatgtattttagcggcctccaggcagacctgataaatattcagcgagtgattagctggtgcatccccacctgcgtcctttgcatagccatgcccgctactctttcacaggcagttttacttggtaagttacaaacgtactggctgcactctgcacctgacagtattgcagtaattagcttgggatgcaaaatgatttctaaattaaggtcctggacttgtaaaatcaagaaagcctgataatcaacatcgtcgctctggtggccattgaataacgggataaatacctaagacaagtcctttaaccatcccacgtggtgataaatgcccgacgtacaaattaaaagtctctaccacacgcaggtgaaataaggtataggtcaagaagagaaggtaggggaaagggtcaatgcttaattatttaaaaatcgctctcttcctcctgtaggaaggtctaggggctaggtcttttagtgcacacgtgatgaaagtgacattttggccaggtgaaacctcaagctggtacaggcagctaaaacacgggcgtcgtgccctggagacaccgggggtcctgaggatggggaaggggctccctgctgcgggtgctgaggggttaggaggtgagcaccgggcgggaggctccggggcaggggctgcgcgtggagcccactcccggacgcgggctcctctcggcccggcacgggtggcgcaggactccgagcccgtcgacaagagagagagcgggagtgggagaaggaagaccgggagaggaggaggccgggcggcaagagcggaagaagaggaggagaactgaggcggaggagggcgagagggaggagagccgggcgcaggaaggggaggaaagaaaaaggcggcggaggagcgcggacccgccactcccggcctcctcccccgcatccccactcgggccggccctcccccggccgccgccgccgccgccgccgccgccgccgccgccgccgccgcctccccttgcccagtgttcccagcaccgcaaggcactcgctgcctcctccgcactcggtccggtccgctcagcgccgccgccgccgcaccctcgccgcacccccgcgcgcgcccggcccgcgcgcccccgccgctcgtcctcgcggcctcgcgctcggggcatgcgcggtgggcggtgccgctccgggccgcctctgccgccgcgagtaggaagcgcgagcgccgggcaccgggctgtcagtgagcctggggccagcgggcgagccagcggctccggctcccgctcccgctccgcgcagcaccagcccgactctccccggcccccgccgcgccccctcgccgcgacctcggccaccggcccgcgccccgcgcccggggtcgccccgagcccgcacctctcccccgccgcccccgcccacccggccctccgcggccgcagctccccggcggaggcaagaggtggttgggggggaccatggctgacgttttcccgggcaacgactccacggcgtctcaggacgtggccaaccgcttcgcccgcaaaggggcgctgaggcagaagaacgtgcacgaggtgaaggaccacaaattcatcgcgcgcttcttcaagcagcccaccttctgcagccactgcaccgacttcatctggtaggtgccgggccgggcactcctgccccgctcctccccgcctccgggtcccggcacccggcgctccggcgcgtccgccccggggctggctcactccgataacttggaaccggcgggagtccgaactcttcgcccggagtgacacgcgcgcccggccctgacaccggcgggcaggactcccgggacgtcgccgtcccgccacacacaccccctggcgcgagagggaggctggccccgtacggtggcgaaggggatccctctccgggccgggcccctcacctccccgggcgcgcccacccgcacgcacccagcggagcggccgcttgccggggtgtgagcccaggggacaggggaggaggagaggccctaagggggcaaaggttcccggagaaacgcgccccggagtaacgggggagcggcggcgattgcactgcgcgcggtccaagttgctggcgagccaggctgggcgcgttcggggtgggggggttgtgtttgtgcttcccatcgggctggactgcgctggcatcttgggcccctgcctactgtaggctgcatctactgggcacggagagactgacttttctgagtgagcagagagagagagagcaaactgttgaaagcttgcagtgggggagggggagttctagcaggcaaatggcacaagggcagagggactcatttaaaatagaccctgtcggccaggcgcggtggctcacgcctgtaatcccagcactttgggaggccgaggcaggcggatcacctaaggtcagtagttcgagaccagcctggcaaacatggtgaaaccccgtctactaaaaatacaaaattagccgggcgtggtggcacacgcctgtaatcccagctactcgggaggctgagacgggagactcgcttgaacccgggaggcggaggctgcagtgagccgagatcgggccactgcactccagcctgggtgagacagagcgagattccgtctcaaaaaaaatgaaacagaccctgtcaactcgagattagacctgtaaccctgttgatgagggcagaggccttatttaagaaaaataatataagggccagaggtcagagatcaggtaatcgccaatgaattcaggcattcttaactcggagggtccctgggggcttatggagaatcgatacatagaagggcttcaggggtctctgaaccctgtaaaactgagggaaattgtgtttgtgaatctttttcctggtgagagaattacagctttcatctgatcctcaaaaggtgtgtgacccttcttcccagatccccgtcaccacacaaaagttttgaaagctggaactaaaggagctctaggtcctctagttagagcagcagtagtttggtttttcttttaagttgcccgacgtcctgactcttctacctcttctttgtggtgtaggaagttccgggcaagacagagctatggctagggcttcttagctccctctccttctaggccagggggagctgcacagggtggcagtcacggagtgaatcctgccaccagccagctgtgtggcacaggtatcttgggccactagggtgagcatagtatggatggctctgtcggaatccatcacacctggggaaaaacatcccaaagggcaggtcccatgatcgtggtgcgaataaggtgtttaatttttcctttcctttttagacatctgctcccaagtacacttttatgaaaagcacagccacctctatgagtgatttccactgtctagtcggcatatgaagcgactgtgctcaaaggagtaggtagtcgtagataaggctatttaaaataaaaatttcggagcatcagggcaaagagaatattgcatttggttaagaggaggtcagctgtgagagtccattaaaagggaacagactgctggtgacttttgcaggaagtaggagagttagaaagggacttgcagcatactgaggctagctattgtctttccactatcagttgcccttgaaggatcagcccctggtgagctgaagaggcgctcaggtcaccaccagtattgtgaagtggaaaatgcccccctgaggatccctgcagcactctgcatttaattgtaaaccaaccaattggaagtcccaggaaaccatccacggggattgtctttttcagtttgctttcattattgcttctacggggtccttgatttacacgtttatttcaatattaaatcactgatatttttaagcgaaatgtttagagttagatatggtttttagtaggggggatgactctaagttaattttaaaagtatgtgaaatactttgtacatgaaacattctatgtgaagcaagagattatgactctcaaccttccgaagaaattttaatgcagttcattctggtagaacaatacctgcaattgaacgtccacgtcagggttctctgcttacagagtaaattctctaaagtcatgtacaagaacaaaatagcctccctatgtgctttgaatgctattggttctcagtagaaattagatcgtggtcatctcaaatgcaaacaataggaattatattttctaagatctggtttcttaagccaacattaaatgttaaaagtgatgccgtttggcagtttctagacatgtgatattttaaacaaaaagaagccactttgttatctttagggagataaaaacaattttcatttggtcttcaggaacaaaataagcaacttccttttacaattttaaccataaactgttttgttacttgaatattgtgttgtagccaacaagtttgaatatacagtcatgttcttgtcttgaaattttagtattgataacatagtataaaaaattggaaaaaaggttgatacatcgaaatagttcagtgatcctttataggcaagatttttttccccccaaggttgaatttacacagtaatctgactagatatttaggtatgtttttttctattaaatcattgggtttcacatacaaacctttagtggtagagtacttggtcacataacttgtttaaaatatgctatccaacagaaaatatgttaagatattttgttcttgtttttgtttttcagggggtttgggaaacaaggcttccagtgccaaggtaagctaccacttttggttttattttcaagcacaacatgaaataagcattccaaacaagaacattatttccagtcatattttctttccaataaaaaaatgttatttagataattttgaaatatgagggctgtaaatttgggccttaaaaaataattggggcctactaatctgcatatagagctgcctttttctcattggaaaaaaaaaaaaaaagcctttctgtaattttattttttgccgagaacattcttgtcagaaactgctgtctttgtgtgggtgttgagaaaaaaatggaatcactttgtattcaagtggcttttcttccttgttcttcctctttgtttttattcttcatcgcttttacttatgtattgagttggactcactgcaactaattttaggccgtatttcattctagtaagggtttgttttgtttagaataccagttgtcatcgagaacaaagtttgcatgttttaaagttttgttgatgatttgatgactgatttctatggtatgactatgtagcatgctttcctttcagcttacatatctgacaaaacgtgatatcagccatcacatacagaaagaaatccatttgcttcaccctctgatctgtaattgcatttcacacacatcgaatatctaactttttgtactctccattctaattgtttgacttttcctttttgaagaaacccactttagagcttgtgaaggcatcacaggctcattagctaacttttctggctctcctgctcattgtctatattgtgtttatttagttctggttccatttcccatctgggcatagatttattattagggcaagcagaaagtacattctagcctggaaaatattatcctaacactgtttaatattaagtgcattagagagaaaggcactgtgtacttttttacaactttgagattgtgctagtaaattggttgccttttaaaaactagttcaaatttgtgaacttgtttcttgtatacattttctaaacatattttagatgggagtattttatggtatgattattcatttaatattctaccttcctttctccaagatgtgcttaaaacccctactgagtgtatcattttcagagttgcatttgaaaatcaagggatattccttttaaaaagagaagaaagagaaagatgtgttataccagtctctacaaaagatgaaaggaaaatgtagctctttctagttctcaaagttgtgggcctgaactttatgggtgagatttgagcctaggcttgaacatgactttagggagtttaaagatgtaaggttctgggccaatgtgattgacatctgttatttttggtgatatttttcgtttgggtggggacttacataaatctataagaaaatttttgtactgaatcttctccatactgcttgtctgggagaaagtggttgtcttgttctaaaacttttatcattttctgcataaataaaaaataaggttgattagaataaggttggttcctcttagacccgctcatctgagcagattttgtggaaatcacagtggccgtattactaggctctagggggttttgcatgatttcccccagagcatctcttgaacttttagtggattagcagattaatagtttcatggcaacataactcccttttacctaaattaaaaaagtgaaacccataaaaattttaaactgtataaaataaaaagtgaaattgcatatgcttctcttttccctcctccagagataacttctgtttgagacaaccattcgttcactcactcacacatacttagtttttaaaaggagatcaaaattttatacgactttgcaacttgctcttttcactcagcagtagatggtggatattcttccacatcaaagcatcagttctgccttactctgcttagtggctgcatgtgtggatgtatccaatttattcacccattcctctatcaaggggtattttgtaattcgttcttactagtacaaatacctttgtcaagagcattattggacactagtataggtatttctacaatagatagccagaagtgtgtatgtgtgcatcttacattttaacgggtgctgctaaattgctcttcaagagttccagtgcacatttttttgtattaatgggacttcctcttcatttttaccagtgaagatatcgggtaatatacatcttttacattttttaccaatctggtaggtgaaaaggggcccctcttttagatttccatctcctgcattatgggtgagcttgaactttttttttcaaatgtgttttagccatttgtgttgtgtgaattgccttactctacctaatatttgaaactctggatttacaaaccagacaaattagagaagtgactatgtgctttctatatagttctttgctttggtgaagaatttaacctcagatctctttaaataatgaattaccctagtgcgtttacaaattacagttcacagagaccttttccaatagtatacatttatttgtaacatgctgtctgcttgttatattttgtttactgtgtctcatctgtatttgacttctagtaggcatatgctagtccattgtattttattgtttgttgtaacttaagaaggatatgttacctcagggtgatgcttttaatcccacaaatatagttacccagcattttctgttttggctcctaccgcaaaattaatctttctattaacatctgactatcgtagagtgaagttttcttttaatgctctctaattttgttttttttttcctcggttttgtttgatagaacatcattcttctgcaggagaataactcattctcattcatacctttggcaacacactctctggaaatgacagctggagtttgaaactgctttttgtattcctcatacatcagattatttttacccgatgaggcagtgctttctgtccactagtatgtagtatgttgctttggttagtaggtaaaatatctgcagcaagcatagtttttctttttttaactagaggggtgtgtatgctcccagtgactcacatattcatgcagtaagtaatatagctttagatccaaaatatttatcttcattttacttagtaaatggtgagtaggtatttgaagactaaagaaataagtgagttttagtccttaaaactgggtttgtaatttatgccatttagagaatggcatcttacaagcatgtgaagtactaaagttatttctactttcatttatgttgtatcttggggaagggaagggcgtttctctggagagacttattggcttattctcatgttcccttcatggactctgtgccattcttctttatattgcaatataggtatacaatcctgaaaactgatattaccagggcaagtaacacaggatcccgttgtcagaatttgctgcctgaaacggtgaaaccaagggccattcttctggggaggagaaagatgagtgtgtagtagatttccaagtgggaaatacttttcttaaggtcctcagagataaagacaagcgtgttccttcacagctctgaagtgaccctttttacatgacttggagttgccttcttatttttggttgaatgtttttttgcttgatgtacccctagcactcatttcatctccataaaactagcagagatctagtccttgcccactttttttttcccccgtcagagaaaggagaagaagacaggaagtagatttgtgtggtatggacattgatgaagttgagtttcaagtctggaaggtctgtttccagttggtagtttctgtcttgcactggctacttccaaagtcagtcatcagagaacagagcgatccactgtactgctcaaatgcactctttctctggggcagtggagctgaaacagtgttatccactgctttcagtactggaaaagggaaagagccaactcgatttttttccccctccttaggcggagcaacacccatgcacttctctaattacagtggtagaaacagcctctcaaaatgtgacctgcctatttcaaatgccaaacagttaacatagtttgtttcatctgcctaacctccacttgttttctctaatttttttttttttttgctattctttgtcttttaatatcacaaatgaaaatgtgctacaaacctaggctctttgatgaggtgaagatactcaagagacagcgtgagaattaagctctgtcagtaaccatgaccaacaggagcctgttgtccctgaatgatcgtcactggattttgaggggtctgctgggaaagaatttacatttttgtgctttcaatgatgctactaaagttgttttgaatcttgagtcatttccctgctaagaacataacacatattgtacttcatctgtgacttcaactgaagctctgcatttttcagtgttaagggttaaaaaatcagctactcttcccctttgatattttgttttgaaggcctgtttcagagaaggtatttgcattggctcatctgagcagggtggtgatttctattccttctgtaagaatgaaagttggtgtttaagggaagaaaaaaaagaatgagtctcctcttggctgtgtgagctgagggattccagaaaacaagactacttaaggaaggtggcctttaaacagaaagggggcagtagcgagtgagtcaccagcctttcagaaaagggatgcgccgttgtcctcatccgccacggtgttctgagagctgagttgtatggacaccaagtaccaggagataggagactgaggtacaagttgggtggaatcatgaggtaggccagattgagcagaggatctgtctgtcctccctatggccaacttgagcagaggatctgtcctccctatgtactgcattgaccgctgcttgcactgtgtggcctctggctgcccgctggttttcaaagttagtgccagggttttccattattctgtcttcaggaggggttcagcccttggtacctcagttttgattggttacccatccccaaattgtaagttatgttaattagagataaactcttggaggtttagttccaaaaagatagaatgcatggaagactgagtataatttgaaacctagagtttttgtagtaatgccaggtcaaagcattatctcagtctcaaagatgaaatggtcagtaatgcctgaattacagagaaaagtggtggaggtggacagttagaactgcctttctgtggttgggtgcagtggctcatgcctgtcatcccagcactttggaaggttgaggcggtcgaattgcttgagcccagaactttaagaccagcccgggcaacatggcaaaaccccatcgctacaaaaaatagaaaaagtagctgggcatggtggtgcagcacccgtggtctcagctacttgggaagctgaggtgggaggatcacttgagcctgggaggtcgaggatgcaatgaggtgtgatcgtgccactgcattccagcctgggcgacagagtgagagcctgtctcaaaaaacaaaaccaaacaataacaaaaaatgctatttttcttttcaacagtgtttttcctccgtaaaactgcattaatacttagaagtagggatggttagataaaactagtgttgagtgttcccatttggtgctatatacttgttataaaatgatttctgattaatgactttctgaattgctactcttttactttatacggtaagtgaaagtgtttcgttaatttattcacacatcaatcctacccccgccaccagaagctggggttgtagcatatggagaggctatttatcctcataggtcgtgaaagccgaataaatgtttacttttgcagataaatctgatgtttgagtttccttttctttatattattttatttttttgagatggagtctcgctcttgtctcccaggctgcggtgcaatggtgcaactttggctcactgcaacctctgcctcctgggttcaagcaattcttctgcctcagcctcctgaatagctgggattacagatgcatgccaccatgcccagctaatttttgtatttttagtagagacggagtttcaccatattggccaggctggtcttgaactccagaccttaggtgatcctcctgtttcagcctcccaaagtgctgggattacaggcgtgggccactgcacccaaccagagtttccttttctttacattttttggtggtttcctgccctccgagtatttcactctcctggatgatactattgaaatttaagtttttagacacattaactcctcacttgctcaattgtttttcttcatgcagattcagagtattccatttccaaatagcattagtttcacagctgccctatcaggataagtccaactccttagcaagacattggaagactcttaaagtctcctgcctgacctcttcagacttacctacaatgctttccttcttcctatccctgggtcattgtgaataagttgcagtttcccagaaagtgcttgtttcaattctttcctcaaccccgtttgcccagatgatatctgtttcacctgttaagtcttagtctaaggtttagctctggtctttcccaattgtcctattctacatgttcttcctatcgtaggaccttttttttttttttttttttgtgagacagagtgtcactctgtcacccaggctggagtgtgcagtggcacagtctcacttcactgcaacctttgcctcctgggctcaagaaattctcatgccttagcctcctgagtagccgggattacaggcacataccatgacacccagctgatttttgtatttttagtagagacggggtgtcgccatgttggtcaggctagtctcgaactcctgacctcaagtgatctgcctgcctcggcatcccaaagtgctgggattacaggcgtgagctcccgcgccccacccttcctatcataggaccttcacactgtatcacctctctacttctgtttcctctgccagttttgagtgcgaggactgagtcttatttctttttgtgtctccagtgtgtaatgtggtgcctgacactcagtagatactatgtaaatatttgttgggtgtgtgattatataaatattaagagatgtgatacaagcattcataaccagaaagatcacagtgacttctgcctggctgccttttctatatttttttaaagcaagtttataatccaaagttgtgccaactaagatcttaggatcattaaagaaaaagtacttttaaagctaagcatacttattcaaaagagggagcagaaaattctacctttatgtatataataagttaacatatgtaatggctaaacctaacacattaacactgcagaaataaaccacttaatgtgtcttctttctatctttagaatattatccaagcatcaagaataaatcttattgcacaaataaaacaagagtgtatcatgggctatagcaggagggggaaaatgtcttgggtatagggtgagaaagtaaaaccagcttttagtacttgtttggtacagttatttaaatgctctattttactttgagattggtaataactggagctcaatcatcatgctccagagggagtagtagctcaacttcactgattctgttatttttaaaatttttgtacctgaaaggtttttgtgcgttaatacattttttgtgccttaatacaaataataaaggtttttgtgctttaatatgcaagtaaatgtacatgaatggcagcggcagctttggagtgaaacagctgtgattatgtttatcatcacagattataacggtgattagaatcactttcaagattttattcaattgaaaggaaagaaaatggatatgtattcaatgctacattatgtcagacatctagctttcatattttatatgctttcattccaaaagcaccccataacaggatgttatccccatcttagaaatagagctaaagtacttaaccaggctggtggggcgtgtcatgggttcagattctaacggttctgcagaaaacattcttcagagccaagtggaaacttttggtatgaatgaagcccggatttatattaggagaggaaagaatgatgccattatgaaacatttcttggtgacataaaattaaggtttcactgtcctcatcagtctgtcaaaatttccacggcagaccctttatttcaggtcttgttttccacccaaactgtgaaatctcatgctaaacttaaggcatggccacttcagtgttggctgtgtctagtagaaattgctataactgcattaaaaaaactctttattaaattatacaaaagggaaaatggtttctggaaatagatttctatcaaggatggaatggaagggaatgatttgattaatggccagcacgagataagaattatttgagagcaagtccatcaagtaagattagcgtaagggcagttcatctttaatgccttctcttgctgttccccctccagtatccatgagcaatagtagatccatctgtcccgtccacggtgactgcagtaggtagttaggaaataaaccataaggatgtaaatatgagacatgagtttagctctgacttggacaagcttcctcaagtttgaggggatgggtcaatgagggtccagttaacagttgaattgagagtaaaattctactgtagagattaactcatggttttaccgtcaggaaaactggtagttttgagttaatctctacgatagaatttctttctctctctctctctctagatatatatatatgtgtgtgtgtgtgtgtgtgtgtgtgtatgtatgtatgtgtatatgtgtgtatatatatgtgtgtgtgtatgtgtatgtatatatgtgtgtatatatgtgtgtatgtatgtgtatatatatgtgtatatatgtgtgtatatatatgtgtgtgtgtatatatatatacacctagcttgtgtgatacacacaagttcgtgtgtggttgtgcacaaagtttatgacgtaggggttttcttatacttgaaacactacaactgatagccagcacccatatagcacttactgtatacactgttctaagcactcacttttaactcacttgatcctcacacaattctgaagagataggcagtgttgtgattcccgttttacagatgaggaaacaggcactgaggcacagggaggtttagtaacttgtccacagccacatagttagaaaatggtggggctgggattcagacctgggcagtatgagtccagatgccatgctgttaagccaggtgttctgctgcctctcacaattctccttttcttgaagttttgtcacacttaaatcacaccattaacttgaatgtcgaggtattaaagaatgaagtgttttttctttttttttttttttctgagacggagtcttgctgtgttgcccaggctggagtgcagtagtgtgatctcaactcactgcaacctccgtctcctgggttcaagcaattctcctgtctcagcctcccgagtagctgggattacaggcatgtgccatgatgcccggctaatttttgtattcttagtagagatggggtttcactgtgttggccaggccggtgttgaactcctgacctcaggtgatccgcctgcctcggcctcccaaagtgctgggattacaggcatgagccaccacgtccagccggaagtgttttttcaattcagtagcacttaatgtgcttcctgcctgtagtgggagcttatggcctgatacatggacctctgtttagtctatgtcatgccagaccctgcagggcgcaggacagaagacatatatgaaaacaacacattgtaacaatacatctatcacgtacattatattacatcttagtctgaatgaaataacagtttttgaagcatgtgggaaggaaggagatattttttgagctcatcaggagatggctcttgttttgggctttgtaggttgctagaatttcctttgattaggaaaatggaggaagctcttctaaggtaagggaatggcatgcgtgagagagggatgagagtgactcacgttccaggagtagtagactgagagagcccatcttatttgggatgttgcccccactgacctccaaatggaagaacagataggaaaaatatgtagggagctacttcatgctttgccacatactgattctttattaaatacatggtttcctcttgtaactttttgttttcatgtcatcattttcagaacaaagttacaaatacagagattactgtatctacatgtagaagatacattgtactgaagcttggaaaataacttcttgtgtttaaaataagcttgttcaaccggtgggccgcatgcagcccaggatggcttagaatgtggcccaacacaaacttgaaaactttcttaaaaaattatgaatttttaaatttttatttatttatttgttttaaaagtttatcagctatcattagtgttagtgtattttacatgtggcccaagacagttcttccagtgtggcccagggaagccaaaagattggacacccctggtttaaaaagtgtgctactttgacacttctttctgctgatctctctactataaggaagctggcaatagtgattattgattatatatagcatcatgttgggagtccagggtcttaccgcatggaaattatgactggagatgagatactcagttatactagatacatgtattaataagggaaaaataaagaactaaaatatttacatattaaaaatcagcagccgggcgtggtggctcacgcctgtaatcccagcactttgggaggccaaggcaggcagatcatgaggtcaggagatcgagaccatcctggctaacacggtgaaaccccgtctctactaaaaatacaaaaaattagctgggcgcggtggcgggcgcctgtagtcccagctactcgggaggctgaggcaggagaatggcgtgaacccggaaagcggagcttgtagtgagcggagatcacgccactgcactccagcctgggtgacagagtgagactctgtctcaaaaaaaaaaaaaaaaatcagtaacactttctattttagaaactgtcaactgatgtattcagtcagaatttctggttcatgatccgtagtttattccttctctctccatgggctaacctcgggctgatgtgttttcaccgtggtcagaaaccttggtaaggaaaggaaaggggtgctgcagtgtactggtatcctagtttggagtattagttttcatctgggattgagatttgagaaatacaagtttacatgatactgctaccatgctactgtgaacttacagtgtactaccaccccatgggtggaaaggatgctggaacagaagctaagtaggctgcccttgtgtgtgactggtgaattgggaagctgtaatttgaaattggggagatttagtgaatgtcttatgtttccattgcagtcgtttttttagttgctgaagctgtacagataagtagccaatccctttttctcaacttatctcttcatttttttccttctcttaggtttctaataaggaatgatttgtggtgctgtttgtgataattggaataaaactctcactggtttagaaagcttggctcacagttgtaaagacttccattagcttccattcagatttatgttgaagttaaatggctgtacactagcttaaatcattttcctccttttgttgaattcatgcatgcaactatacatcctaagtgaatgaactgtcctaaaatgtgaaaatgggagattactcattttttaaaaatgtaaaatattttaacttgattcttaagtatttacaatgtagaaaatagcttaaaacatgactgttaagttctaaatatgaagatgtttttcttaatgctgttatagttgggagaagttgtacatggatgacttaaaatttaataggtgggcttcaaaataagatgatcatattatgagtaatttgcctaacaatacttctgaagttttctttttagtgaacttaattttatcatgtgccaaatttgtttaatactgaagtgacttttgttgctttagtttcacattagtttcttcaatctgaatggcacattaatatggaaaacttctctagaattctgttttaattaaaaaatgaggctttgtttctgtatatcacatagatgtgactttaaaatggaaatgatcgttaattacaaacagtttagaaacatggaggaatgatttttttttaatttttaggtgctaattcaagtttagggataatggctgataggcaccattatccttttttttttcttttttacttattttgtacaactaggcaccatagcacatgctggtattgagctggattgatgtctgtgtgatgcaaattaactttcaagtcatattttataaagctgagttgtcgggctggagcgggaatagttggtatgcttaagacttgtcatggtgggttgggcgtggtggctcacgcctataatcccagcactttgggaggccgaggtgggcagattgcttgaggtcggtagtttgagactagcctggccaatgcagtgaaaccttgtctccactaaaaatacaaaaattagccaggcgtggtggcgggtgcctgtaatcccagttacttgggaggctgaggcaggagaattgcttgaacccgggaggcagaggttgcagtgagccaagatcacgccactgtactccagcctgggtaacagagcaagactcggtctcaaaaaaaaaaagacttgccgtggtggctggcctaagtaggcagattgcttgaattcatgaattttagaccagcctgggtaacacggcaaaaacctgtctctacaaaaaaatattttttgtaataaaattacaaaattaggctaatttttattagcctatagtcccagctactttggaagtgggaagattgcttgagcccggtggttgaggctgcagtgagccgagattgtgcagctgcactttagcctaagtgacagagtgagaccctgtcccctccacccccacccaaaaaaaggcttgcaatggtggtctgccatggtggtctgccatgaatctaatgaaatgttgtggaaggataatttagaggctctgggcttttttgtttaattttctgagtaatatgacaattgaagtatattgctaatgcttttctagatgttatatgttttatttaaagtaaactctggaaaatagaaagcatttgtgattttaattttgacagtatcgtttgtgcacaagttgtttttggctgacttacccgttggtgaagaattattaaaggtcaaagttttatctcgaaattatgaagcacgttattaactttggcttctgttgtatttccagtgtgttcctttttgtcaggttatattttatattctaggtattttatcctgatagcctgatactttttcttatatggagactttttcttagcatgaaaaaaaaatttttttaagtagaatatatttcatgtcagatgagcaaaactttttgtcactaagaagtaactgggtatctcttacatgacattgggttttaatattactaaaattatatattcataggtggtagtcatgcaataacctgaattcatatacttcttttttttttttaattttttatttgagacagagtcttgctctgtcgctcaaggtggggtacagtggtgtgatcttggctcactgtaacctccgcctactgggttcaagggattctcctgcctcagcctcctaagtagctgggattacaggcgcctgccaccacacctgactaatttttttgtatttttagtagagacagggtttcgccatgttggccaggctggtcttgaacacctgacctcaagtgatctgccacacttcagcctcccaaagtggtgggattacaggtgtgagccactccacctgcctcttaattcatttacatttaaatactgacctttgttgaccttcttggtgaatcctgttgtcatagggtcaggaaaagccctgttgttagaattttagagtaagaaaggaccgtagaggctgtctagcccaggttcttgaatttatacctgtagaactggctataagagttaagtgacttgctgtaaaccaaacccccagagagtggccacttaagtctccagcccctacctcctataggatgaccctgtgctatgaacctttgtacttgtactctgtagtcttgactctcaaatgccattcccagtgagtacaagtgcccatccaatactctattttttttttttaaaaaaagaaagcatgagggaatctgcaaacaaagcagacgtgagattccttttattttctttgaaaaacggcagtgccttttagagtcaaatatgcatctaaactctaggagttttaccaggtaaataaggattgtatatttagctttcataatttataggtgaacagtctagtaacaacataaagaactcgtattaaagaatattaaaaatgcttcagacttttgatttgtattggatgagaattcatgggcaaggaagatgaccgttcacgaaattgtatattttttctctctaattttaactctgtgattctctggcaacaggctatacagttctggtgttacttagtctgcaaaaatcttacattgttttcataccagagctgattttgcctttttatatattacctaaaatacacacatacaaataaattactcattagttaatctacaaatgtacatatttttagtagctccctaaacaagatttaaagcttgactaaatgtagtcatggagcttattatttggtagttttgcattctgtagtttatgtaactctatccttaaaattgaaattatttctgagtggtacaagccaaatacagaagtcaaagctttatttttgatagtttcagtgttgttgatttgaggttctgaccttggaaataaagatacagaaaataaacacacaaaatatacaaaataacaatggacatttatgtatgcttttttcaatgtttattttctagctaaatccaagcacaacctaaaagtcttataaatattccatggaaaattttccttcctatgctaggtttctgagttgctttaaaaattagtctgaaacaatggttactttttttctccttggtaaatttccctgggggagtctcttggacattctttattgccctgagtctttgaaccatattcagaatgagaaactgaagacagttggtctgaagatactcggaggatggacagaaatgaccacagctgatttgatatgtatgaataattttgaaaaattttgatagaactcaagtgccaaggacagtttccatgtcgccttctttattgttcctttgtgcctgctatatggatgttattgtcttttttgaataatggcctcccttttcaaataatttagctcactttttaaaaattttttttagacagccttgctctgtcgtctatgctggagtgcaatggcatgatctctgctcactacaacctctgcctcctgggttcaagcgattctcctgcgtcagcctcccaagtagctgggattacaggcatgcaccactgcacttggctaatttttgtatttttagtagagacagggttttgccatcttggccaggctgatctcgaactcctgacctcgggtgatccacccgcctcagcctcccaaagtgctgggattacagggtgttagctaacttgtcttaaaaaaatctttgatagttcccagaatgaagggctgaggggacttgtatttgttccatgaactcagactcatgctatccacatcctgaagtgatcaaaccatccttggctctaacaactggagttctttctcatcattacccttctgaaatctttagaagaaataggtttctttgctccaaactttttaaacttttagttgctttggagtaatgtcactctgggtgaggtcagccttgtcagggtggttgctgagtgcatttatattggttctcattggcagtaatctcatttacaagcatagttaatagaaatggaaggccaaagatcttatgtcattgcctggtctcttaggagagatgaaataggaattcatggagcctcagagatctggaaaagcatcttcctgtagactaacactgtcctgtagaattttgtgtgatcatggagtgttccctaatctgcactgtttagtatggtagccacttgcaccatctggctattaagcacttaaaatgtagaatgaatttttaatttaattcattaaagttaaatggctacatgtagctaatggctactgtattggaagattcaaatttagactatttttaagaaaataaaattctttaaattttttaaagagatggagtctccctctgtcatccaggctagagtgcagtggtacaatcctagctcactgcagcctccaactcctagcctcaagaaaccctcccaccttagccacccaagtagctaggaccacaggcagctctcaccgtgcccagctaatttttaattgtttttttttttttttgtagagatggggtcttgctatgttgtccaggttggcctccagctcctgacctcaagcaatcctgtctcggcatcccacagtagtgggattataggcatgagccactgcacctggctagctttggagtattcttagggagtaacattggatcatattttttaaacctgaatttcattgtaaaataaaacacatacagaaaaccatgcaaaacaaatgcatagtttaatgaattatatgtcaacattcctgtaaccactgcccaaggctaagtagtaaaacttgaccagtcctccatgtgcctcatccctcccaccaaagtaatcactattatgacttttagattcatggcttcctcatgctttttagttttatcacccaagtgataaaacttatccttaggcactatagtttgatcttgcatatttcaaaataattgcaaatgtccttaaatcttttttaaatgatcacttcctcctccatctcctccttttccttataatttatctgggggagtacctgacttcttttgacctgtggagttttccacaatcagaattttgctaattgcatgctcccagtgcacgttaccacattcctttgtattttctgcaaattggcagcttgatccagaggttcaaatgatcagactcaggttgatctgggttatttagtttttaagatgcctttataacttcacatgcttgttaattatgggtctgttattgtggaaagaacaccaatggaatgttttctatcaaggtgtccaaaattgagagcagttagtatgataaaatggtttatgttaaattttgctgtatctaaaatgcaacactgagacatctactgagtgctacttgtggaaaatcagattgtcagaggtttctctaaatgtatttaatatgttcattggacctctatgcagattgagtttttatcaactgcttctgtgggcaagaagtgtgtatgggtatgtctgctggagtggtagaaagaattgctaatcagatgggcacggtggctcatgcctgtaatcccagcactttgggagtccgaggcgggtggatcacctgaggccaggagttcgagaccagcctggccaacatggtgaaaccccatctctaccctaaattcaaaaattagctgggtgtggtggcacattcctgtaatcccagctactgtggaggctgagacagaatggcttgaatctggtaggtaggtggaggttgcagtgagctgagatcacaccactgcactccagcctgggcaacacagcaagattctgactcaaaaaaaaattgctaatcaaatcgttatagccatttacttgtctaaacttcacccacatgactgtacataccatcttttttttttcctggtcttttaatttccaacacaagattaaaattgggttttagttatttttgtgcactggaacatctggtggcaaagaaagcaggaggtgaattgggtgtgttcctgtttgaagaagcagatggtcaataacacttggacctgctgtgtatagaacttcacataaacattgatatggagaaagagttttcataaaaattagcctctttactcttatcagggagtttaaaatataactagataaatatgacttagatacacaaaatactaagggtgcttttatgaagaaatataggcaggcatcagtggctcacgcctgtaatcccagcactttgggaggctgaggcaggcagatcatctgaggtcaggagttcgaggccaacctggccaacatggtgaaaccctgtctctactaaaaatacaaaaaaaaaaaaaaaaaaagctgggcatggtggtgtgtgcctgtaatcccagctatttgggaagctgaggcaagagaattgcttgaacctgggaggcagaggttgcagtgagctgggattgtgccactgcactctcgcctgggcaacagagtgggactctgtcttaacaaaaaaagtcaacatttataagttaatatataaaaaaaatttgagagactttccaatgtgataaaaaaagcagtagactggaaattaggtaatcttgatttgtctccagtttaggcctttgtcctcatctgtgtaaatgagggaattagactctagtagggatagcaaacatatgacattcttgccagatactatggcagataacactcattagtcacggtcttcattcagcttcagaattcttctcaaatttagggctccagtggccattacatattggttgattggaactgacatgggagacaacaatttgccattcctaggctacatcctttccaagtcccttcctagctacagatctcctctgtgaataaagaaaaatccttggaagctctaaattaccctgctagtcagtgtttctataacatatttcccccacttcttttaattcttccctggaagtgcagcatctcagaaaaacaactatgccagtaaaaatttttcctaaaaatgttatccattgaaatattgaacatttcatccaaagcaaaccattggtcattgtggattggccttaggccagaattgagttggtttagaatgggttggggagtgggggaagccaacaatcctttttatcccttgatgttatttttctttattagcagcatgtaaaatgttaaatttttctaatttttgttgggcccaagccgatgtttattacattcaatttatgggaactctttgcagttgaaatttggtatttgagtcacgtattgctttcatggtcttttacagagctctgtgacccaagtagtcactctgttgcctcccgccccactttaaaaaaaaatctggacaggaaataacaaaatactaggagtagacttgtgtttgaccttataggaaccataattaagggtgaaatagtgggatcctcaccccagcaatgcttgatgatagtaggggtagagtgtcctattcataaatccacaggagagaaagtcatgttggaaacagcaagtcaggaggctaatgttcctaaaaaccctttgagaacagggtgtagagaagagagaaaaagccctaaggggcgggtggttgtgatttattgaaagcttactccgaatcctttgagctacctagagagccctaggattactttgagtttataggactgcaagcttttgcatgcacaactcctatttttgaaaatttgacctttaaaatgatttcctttcctgtctcccatccctctccacctttcccccttttaaaactggacttttgtgtaaagttttaggttttagggttgatgtgaaggccctaagacctccatctatgagtggctaccatccattcacacacctaaaaattatttagcaggtaccgtactagttactaggaataaccggaggacctaccatttgttgagaaccccctttgtgtatggcccactgttaggcactttatgtagatatcttttctcatttaatcttcactaaatgaggacagattattttctggatgtaactcagatttaagtgttgctcaaatcacactacgtgactgggttagtgtttgaatgtagagcttcatactcgttcattttgttttttctcatgacatggatttttgtgacatttcataaaaaaaggtttttgaaaggtaatttctccgtgggtttgcatatctttaaaagcaaatgttgtcttccctgccctctgccctcactcacccgtaataaattgtaaaaatctgtctgtaagagcatgctctttaatttcctgtcttatatcctggtggtatgtgatgatataaaacaagtgtggctgagcctggcaaatttataagattgagaaggtttcaaagatgcatgaaaatgggtttacgtataatcaaaggttaattcaactctaacactttacttttgaggagcatcctcttttttgtatccctacctggggatgagagctgctaggagcgcagacaactcagtaattgtgtgcctgcctcatgcctagtctgttcatccttttgagctgtcaagatcaattatgttgaacatagccagagtggggtgtagtctgggtacagactcagcttttcttggcattggcagtatgtgacttctgtatctgatgtgtccatccaattcatattttggaatttacttagatatgcctcttattcatcagtatttgaaaattcttgataatctaaagtttgatccaggggagatttgctgaaagtgacatcaaacagtacctttgttttacttttaataatggattcatgtaaaaatcaccaggcatggtggcagacacctatagttccagctactcaggaggccaagatggggggaatcacttgagccctggagttgaaggctatagtgagctatgatcataccactgcactccagcctgagtgaccaagtgataccctgtctcttaataataattaaataataggccaggcgtggtggctcacgcctgtaatctcagcactttgggaggcagaggcgggcagatcatgaggtcaggagagaccatcctggctaacatggtgaaaccccgtctctactaaaaaatacaaaaaattagctgagtgtggtggtgggcgcctgtagtcccagctacttgggaggctgaggcaggagaatggcgtgaacccaggaggcggagcttgcagtgaggtgagatcgagccactgcactccagcctggatgacagagtgaaactctgtctcaaaaaaaaaaaaaaaaaaaaattgctgggtgtggtggtgtgtgcctgtaattcaagctactggggagactgaggcacgagaatcactggaacccgggaggtggaggttgcagtgagccgagatcgcgcccctgtactccagcctgggcgacacagtgagactgtctcaaaaataaaataaaatttctggatgtttctatcgtcatgtgctcccgtaaccgccagctatctgacatcaactctgtaaacttcatgtcctgtgtctccttcgtccacatgacttacatttttttatttcaattcatcttttctgctctcatctctatttctcatctttttgaaatttgtagtcatcagatagcttttatttgagtattaatatgacaagtttagaggagaattatttcacagaatgaggtctgaaattttaggtgactattcaacagattttttttccctaagcattcatcgtcatatctgccagccacggtgcctgatgctggagatacaagtgagcaaagctgagactacctctgctggaatccctctagtgatggacccagccactaatctgaaaatcatgtggacaagtaacaaaagactgcatatggagttaccaaggaaagcactacgggattttggcagtgtgtaacaggggacctaacttagtctgaaggatcaggaacgtctctcctgagaagataacatttttccctctgttgcccaggtaagagtcagtggtgattgtagctcactgcaatctcaatctcctgggctcggtcctcctgcctcagcctccagagtagctgggtgttaacagatgcatgcccctatgcctggctattaaaagacaattttttttgttttgatagagacggggtctcgctatgttgtccaggtcggtcttgaactcctggccggtcttgaactcctggcctcaagctatgatcctcctaccttggcctcccaaagtgttgggattacaggcatgagccaccatacccagctggaaataatatttgaatgaactctaaaggaggaaaggagttaactgattgaaaatgaaaggaaaacccttctaggtaaagcagccagcaactgcaaaggccctaaaaggggaacattgtgtgttctagaaactgaaggcagaggctgggtgcggtggctcatgcctgtaatcccagcactttgggaggctgaaatgggcagatcacttgaggtcaggagtttgagaccagcctggccaacatggggaaaccctgtctctactaaaaatacgaaaattagccaggcatggtggcacgtgcctgtaatcccagctacttggcaggatgaggcaggagaatcttttgaatctgggaggcggaggttgcaatgagctgagatggtgccactgcactctagcctgggtgacagagccggactccgtctcaaaacaaacaaacgaaaactgaaggcagatctcatttgctggagtgttttgaatgaggattattatggtgagaagaggctggagaggtaggcaggagccaccttgcaggtcttagtccatttaatccgtgttaaaaattcagtgctttagcccaagaaccatggcagtctttcaaagggctttaagcaaggaggtggcctgattagtgtctccttgtgtaggaggatcatgcctactgttatgtgaagaactaactagaagtgggcaagaatggatggggcagcctgttgggaggtctttcctcattctggtgagagacttggttccagaaaccagagatgtggtggaggacaaacgtttgcaaatccaggatcctttttaggaggagagatcagctggacatgatttggaggtagaagggagaggagggtatcaaaggtcagaggactgtggtgccattcactattacgtagcatgctagaggaagaccaggtttcggggaagaccatgtggttttaaacttgctgaatgagaagtgccttagaggtctccaagtgtatggtacagggactggggcagagggtgatgccgggaaggcagctggatttaggtgctggagctgagagaggcagccaggactggagagtcatctgcttacaagttaagttgaatgaatggcaaggatttgagtgcctggaagaaggcacagagagaaaagatgagagggctgatggaatcagtatagtttagtcatctacggagatgggaatgaacaagagagggcagggtttgcccagagaggcaggaacaaaaccaggagctgtggtgttaggaaagccaagagaagagagaattttaagcaggaggtccctactgccataggtaggacaaggtttcaagacaggagctgctctgatggcctgtggaggttggagcttcatcgtaatgggcagagtaaaggaaatacctctgcagccatctgagcagtaattccctggagagttaccaaggattgttcagtcaaacacaccccgtcatttatctggatagttctatttttccatacattgtctttgatcgaaatgtcgatcttttttcaaccagccgggatgaaaatggtgtgaatcgtgttctctctctttagaaagaaactgataaaattgggttttctttgttcttccttttattttcatccattcaatacctagtcctcactgagctggtcttactcaacccattccctctgctggtctgttgggtactaataacagatggaaacaactgggaagataaactattttcctggatttttttttttttttttttaaacagagtttcactcttgtttcccaggctggagtacagtggcacgatctcggctcactgcaacctccacttcctgcattcaagagattctcctgccttagcctcccaactagctgggattacaggtgcccgccaccacacccagttaattttttgtagttttagtagagatggggtttcgccatctcggctaggttggtctcgagctcctgacctcaggtgatccccctgcctctgcctcccaaagtgctgggattacaggcgtgagccatcgcacctggcccctggagataatattgatatgtgactcagggaggtaccaaacccaactgttgccccctttcctttatttacttatccaggatatttatctatatctgtaaaaggatttattattttttagaatcgtacagctgtaatgtctattcatcctgtcagaagagataaagcggatcagtaggcaagcatttgttgctgcttgagagagattttattaagctaaaatattccattagactcaactccattttcaaatattttgttaagagggtctcaggatgactgtaggaaaaaggtatttggaagattgtgtacactgacaataactagattacaaaattttataaattagttaagatggactttaaaatagcaacaggaaaaacaattttggacttgtctgcgagtgcgagtgaagctgatagtaatgagatttatgggttctggccctgcagggatcccagtagggatgaataaagcacatgcctgctagtacattcactgattctgctcttggatatattatttacttctttcctcttttagtaagactttcatctgtattagtaattgttctatacttttaatctctggagcaactccataaattaacaaggggttgtgtctaagatgatgctgatagccctgaagatgttttatttagtgcttttgggatgatgtgcagagatgggatgtcagaaggaataatttggaatcttatctccctgctccttggactcatgttatcaggggaagggagcttggggatgtggctgtcttagctgtgtcctctgatggcctcatctcagtggtttgggttgaaagactgtatctcgtgcttcctgtcccatcaacctctcccttcgtctgtttttctcttctgtgtttaagtataaacagaacccctttgtacctctcatctctttatcttctgaagactctgatgtggctactatgctctcccatttggttaatgctactttaggtatttagtatctttatacttttgttgtgttagttgtgatcagcaaagttctatgctgtagcaacacattaatctgcagatctcagtggcttaacactacagaggtccacttctcccttgctgttcatattcattgtgagtcggtaccgggactctcctctgcacagacttgtaggatctcagtacctagaacctaaggccggatctttcaggagctggggaggagggactggaggatctctcatgggcttttcattgcttcagctcaaaaacacttccactcaaagtcattgggcagagaaaaccacacaacttaattatcttaagaggtggggacaggggaagtggagcgaccgagagaagggttggaacatacagacataagaatgagaaagtcttacgagtgttctggtctctgccccatctgtattatctttgtttctgggaaggaaatttctgacagctgtgttgctagcataacctcttggttggtaaatgcattgctgtagacttttccttgatggaaactttctccaagacaatataaactacgcattgtctctttcttgttaaaccacttttttttacagtttattttttcgtttgctgttgaagatttgatcagtattttccttttgaatccaatggtagcaaaccaattttttttttttagaatatattaaggcaaaagaaaacaacttttaccccattcataataggatgtataaaagtaatacctcttggaatagaccatgggaattctggtgatacctagggcatcttatttgataaaatattttttctttctttccttctttcttccttccttccttccttccttctttttttttttttttttaaacagagtcttactctgttgcccaggctggagtgcagtggcacgatctcagctcactgcaacctctgcctcctgggttccagtgattctcctgcctcagcctcccaagtagctgagattacaggcatgtaccaccatggccagctaatttttgtatttttagtagagacagggtttccccatgttggccagggtggtcttgaactcctgacgtcaggtgatccccctgcgtcagcctcccaaagtgctagggttacaggtgtgagccattgcacctgactgaaagtattttcaaagcctctgctatggagtatagtgtgagatgtggagaagctgcagagggaggggcacgttagcatctaaagactctgttgaccatcatccacattaggtccattctaccattttctatgaagtctaaaataggttcctgattattttgtttttaattttttttttttttgagatggagtctcgctctgtcacccaggctggagtgcagtggcatgatctcggctcactgcaagctccacctcccaggttcacgccattctcctgcctcagcctcctgagtagctgggactacaggtgcccgccaccacgcctggctaattttttgtatttttagtagagacggggtttcaccatgttagccaggatggtctcaatctcctgaccttgtgatccacccgccttggcctcccgaagtgctgggattacaggcgtaagccaacgtgcctggccggttcctgatatttttaagggatttgtttgtgatttaagaatctggctattttataggacgcttaagtgttctttgtttaaataaaattaaaacttcaaattttcctttacaaccatttgaccagttacctctgtttcatctgccatacatggaaatagctttcccagagaaactgacatgaaggcatgcagtctactacatcaatgacatctacattacaaataatttaaaaatagtatatgaagcagagactgggtttacctattagaaaatctaacaaactatagcaaataagcataatttttaaggaaaacagatccctctaaatggtgcaaattttatattaatgaaagaactcaatctttaactcatattcttgttatagcatgaatgatcaagctgttttctgataaatagttcaaggataaagtggtctaatttgaataatgggactttattaggggcatctgcattaacgtgatttgaagcacatgtttgtatgctcactcagttgccttttatataattacattctttatcagttgttggtaaaggttcacttcattttaactagttttcaagttctgtcaggggagagaacctcttattccccatgccctgtgcttgtgaaggggtctgggctacgtaaatgggagggagtgagactgaaggggattaagtcctggcctttgcagttctgttgtcagcctcccccaggaaccagtgcctgactccttgggtccatctgttccgagccctgacagacaggacaagtagaagtaggtctagtctttcttcctactggagggtaacttcggagagtctttaggatgatgctcttcattgaaacctgggggttatactttttaaaaaaatgtgtttcactgtccccttaccctctgattatactagtcttgtgttctttttagaacacctaatataaagtgtaaaaaagtgcaaataaagtgtaaaaaagaggccgggcacagtggctcatgcctgtaatcccagcactttgggaggccgaggtgggtggatcacctgagatcaggagttcaagactggcctggccagcatggtgaaaccccatctctactaaatatacaaaaattagccaggcgtggtggctcagcctgtagtcccagctacttgggaggctgaggcaggagaatcgcttgaacccgggagttggaggttacagtgagctgagattgtgccactgcactacagcctgggcaacagagtgaaactaggtcaaaaaacaaaacaaaacaaaacaccaaaaaaactgtaatatagtataaaaaagaaatgaagttacacatgatcaagtcatctctgttaatcttttgttatactcttctgtctttttaagtgtgtgtgtgcttatttttttttcctcatgttacaaaaatacatttttaggtcttttgttaagaatatattgtgataactcaatttaaaaatgggcaaaggacttgaacagacatttctctaaagaagacatacaaatggccaataagcacgtgaggagatgctccacgttagggaagtgcaaatcaagaccacaatgagatactgtttcacacccattggatggccgttaagagaatagaaacaagtgttgagaatgaggatacattagaactcttgtgcattgctggtggaaatgtaaaatagtgcagctgctgtagaaaatggtatgaaggcttctcaaaacattaaacatagaattcctatgtgtcccagcaattccacttctgggtatctgcccataagaattgagagcagagacttgacagacatttgtacacccatgttcatagcagtattcataatagctgaatggtagaagcaaccctgtgtttgtcagtggatgaatggataaacaaagtatgggaacacatagagtggaatattattgagccttaaacaggaagggaattctgatacatgctgcaatatggatgaacttcaaagacattatgccaagtgaaatgagccaataacaaaaggacaaatgtatagtttcacttacatgagttatacatttcatgtataacttctcaaactcatggagacagaaagtagaatggtagtgggctaggggtagggggaaatgggaagttcgtttttattttcattttatttttttgaggcagggtctcactctgtcacccaggctggactgcaatggtgtgatcatagctcatgacatcctccatctcctggctcaagccatcctcccgtctcagcctccgtaatagctgagactgcaacacatgcaccaccatgcctggctaatttttttgattttttttttagtggagacgaggtgtgactatgttgcccaggctggtctcaaactcctggcctcaagcattcctcccaccttggcctctcaaagtgctgggattacaggtgagagcctctacacatagtgggaagttagtttttaatggtagttccagtttgggaagaaaacattctgcggatggatgatgatgatgattgcagaatggtgtgagcgtagctaatgctgtagaactgagtacactccagcctgggcaacaagagtgaaactccccccactgcccaaaaaaaaaaaagaactgtgtgcttaaaaatggttaaaatattaaattgtatgttattgcaatttcagagtatattgcgatcatttcccacattacatatattttgaaaatgtgtttaatattccattttgtagaatatcttttaccattttatttttagccactgtcatttttctgtttttcactaatgcgaggaatactatgatgaataacctcgtttatcaggtttttctttatagataattacttcaggtaaattcctaggggtgagattactgggctacatagtatgaacctttttaaggctcttgatccatatcatcacattaccctcagaatagttactaaatttcatttcagccaagcacacttccaccagcagtgtatgagggtcagctttcattttatcttcccagacaccatgtgttatctttaaaaataaattgcctgttaagctaaacaatgatatgtcatcattgtttcaatttaatccatttttattactgatgacttctgttttttttccactttcattaatagtacctgaaatatagggagtgcttcatatttgttgaatgaatttgtcaagtatctactaggtgccatatccttttatagatgtgtgggacataatatcaaacaagactgaattatattatacttctctcactgtgtttacagtctagtggaggagtcaattaaacaattgataggtgctatcagttgaagtatgcttgacatgcaaacaaatattggtgatccctaacccaacctgtaagagatggggcttctgtaaggacgtgatgtttaagccaaaatctcgttgaatgggaggcatctcaaggattctccttccaggggatgaaatggagctcaaggaagaaggaatgtttccagaagaaaaacctcaagatgtaaactaaagttggccatttgtattttttcttataggatttggctattcattgtgctttgctctttttccccctctcctattggcttaagtttttttggtggtggtgggggagtaatttaaaagtacctgttatatagtaaattattaaacatttgcctatatagtaaattattaaacatttgctattcatatataatgttttacccttctctggttaattcgccacatcctgaacccctgcaaataagtttgtgtgtgtgtgtgtgtgtgtgtgtgtgtgtgtgtgtgtgtgtgtgtgtttgagacggagtttcgctcttgttgcccaggctggagtgcagtggcgtgatctcggcttactgcaacctctgcctcctgggctcaagtgattgtcctgcctcagcctcccaagtagctggggttacaggcgcccgccaccacgtccagctaatttttttgtacttttagtagagatggggtttcaccatgttgaccaggctggtctggaactcctgaccttaggtgatccgccctcctcggcctcccaaagtgctgggattacaggcgtgagccaccgtgcccagccagacgtgccttctttattgatgtaggaatctgtttaattagatcatttttttcctccgcagagtcaaactcatagtcttgggaggaagataggaagggggcaggcagggaggttacatggggactctgagatgtctgagggtgaggagaggatgaaggcgaggcaaaggaatagatatcgttggtgatccgctaaggacagtgaccttctcaccttatctcagtcctcaacatgtaaagattttcctccattttacaagcaaggaaatcaagtttctaagaggtaagtattgtttgtggtagatctaaggttttgttttgagacagtctcactctgtcatgcaggctggagtacagtggcattatcatggcacaccacagcctcgacctctcaggctcaagtgatccttgtgcttcagcctcctcagtagctgagactaccggtggttgccaccatggccagctattttttttttttaagagatgaggtttcactacgtttcccaggcttgtctcaaactcccggtcttaagcaatccacctgccttggcttcccaaaattctgggattacaggcatgagccactgtacccagcatggatctaagttttaaacctggttgagctaataggaaaacctaacttttaaacttttaataatatacctcaatggttttttaaagggaagtactggaaaactggatgctggctttttgacttctctttgaatattaaatgagcttgactccatggaattcttgtaatcttaaatgccaaagctttagaccataaactaatcactttgtggctttctataagtcaaaaagccaattaaaaaaaaaacttttattgctaaaatttgtaaccagtatggagatttgtgtgtgtatgtgtgattgaacctgggaatcttcccccccctccgccccccttaatttccaattgagtagtgattttttgtggttggagaggtagttttaacccggtgaattcctctagcggttcttgctgaatgatttcctaaggcattttgaaaatctcttgggtagtgcttttaacctggcttcacatttcatctttctttattcagggagtgtttggattttacaccatgcttgaggctgccatgtctcggctgcaataaccagaaaacattggttttctttggtcactgaccaagcttgtcactactcatttctgcctggctctagactgaagacttcagtccaattttccgaatggcctcttttgacttactgtgcaaaacccccactttggctctgaaccattctctgaatattagcataagcacctaatgctgcttgactaaattgtttctgttgagagagggggatgaggaaaggctggcacggggaacatctgttagggctgtaccttttcattgtattaatttttctgacttctgggattattttcattatgcaactcttcaataaagcaaatttggtatgataaggacttaacattcccccccactcattttaaacatatggggtttccaggctgttattcaaagctgtcctacagactaaaatttaaaatacaagtgaaccaagattctgcagctgaatctgggctttgaggagcctacagtgggagaaggggatgaaaaaaaatattttgtggaatgtactataaccaaccaataagatgtttttgctattttaattggctcttcctggcaggagtttcatacagcggtgtctcagacactgaccaaatctgtttatggtaagtcatttttgtagagaacaacaacattcaacaggctatggtatcactccatttggaagtatgtttcctgatcttgaggtcgtagaagaaaatgacaggaacatacttgtgcccacacaggccctaatctgtcttgctggcattccttagacatttatttattgaagagtccttgtgtctatattgaggggagaaactagataggttaaggaatggatgataactttgattctgagagctcttgcgctatcagaaggaatgtgattgacggtgcttgaatgaaagggtaactgttacagtatcaaccaagagatagaggatggctggttttggaagctgacttgcaacactgttatatctggagttataaccttccagagtgttacaaagtttccagtctattcttcctatgtctgccctcagtgagctagcattgagattcggctgtttatttgcagaaatagttaatctatctttcttttaaaattaacgccttctggaaacagtggctcaacggggaaatgaactcttcactaaaatctcacatttcttacgcttccacttggaataagatccctctcaacacaaataatgtttaatttttttaaccactctgaagctaacttaggtttaattttagtttatgctaaaagtttttcttatgtgactcctacagttttcctagagttattgaaaaaactgctcctataaagcaagtttagtttttattctgttcattttagatccttaatattgttctttcattactacttgaggggaatttaaaaagaaagaaatataacagctgttttgaagtacatttgaaaaatggtaaactgcagaatctgttgcttttccttgactctcttcactctcccccaaagacctttaaatagaagctgtttccttttgctgcattaaccccaaaccctatctgatttcttccagttgccgagcaaacagtggcagcttgcctctgaaggccaccaaaaaggaccaaaatgtttgcatggaaatggcaaccaagaaacccctaatattaagaacctaccttgaaatctgccaattaatgaatggaagcttcatcagattttcaaatggcttttataaaattatataatggaggtgaaagtgaaaggtctacactataactcctattacatgagctaaatgtgtaagccttaccatttgatgtgctcttctaggcttaacagtaaggaccattttggagttaaaattgtgtggattagttctgtgttaaacatgtcttcatctcatttatgtattgtattaaactctttggggaaacagataaaaaggacattttaggctttacaaacacgctacacaccataaaatgtttgtttcagcccattgcttactccaaagcaatggccttttgcttgaagataatctcaataatagaaaacagttaccaaaggaactaggttttgggtggacgacttagccctccacaagggactgcagaatcctggtatttgaactggcagggtgtttggtttctttttttttttttcttttttttttttggcttgtttgttttcgtttgtcagaatatggccccagtttggtttaagttttgaatgttcaggaatttctcagagcagacaggggtccataagggcttagtagtgcttctactgtgcaaacagtgatttcttttttctccaaaaattaatttggcgtaagtgtgatcatggctgcttgacatttttttgttttgagatgggagagcataaaccacattcaaaggaaaaattagagcctatgtattagaatatttaaactgcttaatgtagagcaaaggaaaatgtcacaattggatgctgttgtgttctaagcaagcaatgcttctctggatttggatacttgagaaatcctttatttagaagtcattcatattcatctttaatacagcaactgtgaatatcattagccagaagcaataaattttgtgaaaattatttggcaattgagaaggtagggtagccagttgaagtcctgtgggcccaaggaggaacttggcagtgagttattgtcaaaagctgcgagtgccaggagtcagcccaaggagagttctgtgggaatcagaggagtgtggggccagttgagtccttatattatttattcctgcaagcatgacagattgattattacggatctgaaaaatcacttgcatgggtcttctcattctttttcacccctcttttctttctttttgggagtggataagacttaaaaaccacatacctcaggatacattgccgaatcaaaatttttctgatggtcgcagacttccgtgtctagaaagctgctagctttctactatttaaaatacaaattttgggatatggcaagcctcaccatttcttcactgtatgtagtactgcttgctgggcagcagacagtaaatattaagtaagctcttcaaaatcagtttcattccatcagagcatggtgacatttttttcccctgcttttaatctctaaggtgcaaattttgagggatgttaagtaattttaaaaatttatctactgtctttgtgtttgctgtgagatatctttctggagatagaaaattaagtgaggcgtgttgttctgaaatctgggtgccagtaattcttgcatcgtagggagctgtgccttgcactgtgtatacatgtcaaatctgaacatctcacctcgaaagaagtttgccaaaaggtaaaaagcacttcccaaacaatcctacggttttgagtaaggagtactcaaagaaagaaagggactgttttcagatgtttcataaatggtaatcaatcactaataattaactaggtacttgaccatgcaggtatgctcccagcacagtgcgatagcagcttagaatttgagattgaacttttaccctggttatctttagaatactgtttctctttcatttatgtgaataaacatgtattttgcatgttactgtaaacatttatatatccttatacctttgcagtttaccaagaaaggcttataaaattgtgataaagatttctagtgaattattttcttacagctcttatgcaaggaattcaagatttttgtattatcctgagtcatagatataagtggtttgataggttataagctatcttgacactgttctgcatttataaattcagccattctgcaaatgtttctggagcacctgctgcacacagacaccaaggacacaccagcgactaagtcagttgtggtccctacttttgagggagtgttgaagtctattcaattaaaagccaaatcatggcggggcgcggtggctcatgcctgtaatcccagcactttgggaggccgaggcaggcagatcacaaggtcaggagtttgaaaccatcctagccaacttggtgaaaccccgtctctactaaaaatacaaaaatcaggtggacgtggtggcgcatgcctgtcatcccagctactcaggaggctgaggcaggagaattgcttgaatgcaggaggcggaggttgcagtgagccgagatcaggccattgcactccagcctgagcagcagagtgagactccatctcaaaaaaaataaaataaaataaataataataataataataataataataataataataataataaattcagagatggagaaaactttgggaggcagggtgagcatctgaacctatttgaatgtagatataactaatgccaagcaagggaattatggggacaggacagaatgtcaaagttatacacctagaaactataaaaatagtgtaacagagccaaagtctggaggcagagagaggaaaagtaagagaaggtataagcatgctggtgtccacatctttgatagtagatttaactgattctgtctaaaacaaaagcattgttcaaaaaaattgcttcagctttttaaatattttcaccatctcttaatctgaaatttcattaattttattttgttagagtcaagaaaaattatatcagaagtgaaaatagcatgtggaacatgttcccattttcataaagattacttgtcatccatccttgttcatagaaagatggctagaatggtttttgcttagtgttaatgatattatttctgtgtgttggcatttgagttgatttatttttacatttgtctttctactctgcattgcataaattctctatttctttttttaaaaaagaagcataatatgccaagatgtttaaagtagataattttggatgttgagaacctgaataatttttttttttgtagttttaatttccaaaattaggggagagggagcatcttgtttggtttaccgtgctgaccataggttatatgtcattttatgcatataagtttaagtaatttaagtaccaagttactactagtacttgatttcctaagttgctgggaatatacactgtgggctgttcataatttttggtacttaatccatttcctctctgccatgcttagctttttctctatcactttcttccccccttgtctattctggggccatatcactctttgttatccatcactgaatggcctaacttcctttcaaacagagtttccctcatttggttggttttcggttttcatggaaagctattgaagtggtgtaagtgagtatggggtaggggaagctggttttgttatgatcaggtttagaagttcatttggcctgctgtgcagagaccggattggagggagactggagtgagtgagactataccagttgggtactgctgaacagccatccctgaaagtgatggcgacttggacggaggaggtggggaggtggacttaagaggctgtacttgaaaaatggactagacttagtggaagattagatataaagggggggttgaaggacagggagtatccagggtgacttgtaggttctgagcttgcacaataggatggatggcaatccatttgctgagataaggcatgatggaagaggaacttgatgtttgtttatgtctgaatcatctgaatcatgaggctggaccaggtgaccttgggcttcattttaaaattgatagcaccatgatgcctaccattgtatgttttcagtgagggctcatgagtgggtgtcttgggccccatccctccctaacttagaggaaaaaaaaaattgtcagcagcattttctggggagaggttccttccatatttttcattaggctttccaggggggccttggctcaagaaaaattaagaaccactgactaagtatgttcagtcacagtgaccattcaataaataattgtcataggctcgtaaagcagaagaacagtatcgatgaatggaaatttcctattcggcattttagaagggagtttgaagtgctcctaggagccattttcccagcatggtcttttctgaccacctaagaccaaaatgatcattcagtctcttaattcctttagcggtaattgtgcatgtactatttcttggctttatttttatgtttttttgactatgctgtttagcttttccaatagaaacagctagctgtgccgggcgctgtggctcacgcctgtaatcccagcactttgggaggctgaggcgggcagatagcttgagctcaggagcttgagatcaggctggccaacatggtgaaacccatctgtaccaaaaacaaaaaacaaacaacaacaacaacaacaaaaaaacagttagttgttattagcctatccccatgctggctaagttacataatcatccctgtaaagttagtgttggcatccttattttagagatgaggaaactgaggcttagaaatgtaagtaaatggtagctagtaagtggcagaactgtgatttgaatcaaggctctttgactccagagctttctttttgtcacagatattgacaagtcctgctggttggcagaagtcatacctatactctacttttatttattttgagatggagtcccactctgtcacccaggctggggtgcacttgcgcgatctcggctcactgcaacttccacctcctgggttcgagtgattctcctgcctcagtctcccaagtagctgggaatgcaggcacgtgccgccacacctcatgcctgtactttgtatcacacattgtgcattcagatttttactgaaagaacgaatatacctattgcagtatgatcaagcctgttttatgtaatgcccctgcatatgctcagaatcaaggattaccctttttatttttctcatttgtctcctatttcttttgcaaactaaataccctttcccccgcaccctctattgctggattttcttaggaactcttataccttatcttgctttggaaatagcaaaatacacaggattacagaattgttatcaattcacacatttgagatttatatgttaccaccattacttcctacaccagttttctagctacttttgtgtgtgtgtgtgtgtatttaaattgtgattgaattagaaaaccttgttaggaagttgaatttctgaagcaatcatttatgttcagcctgtgtaactaatggacaattatctttcagtttcctctggaatcttgctttaatgactttcagagtagtgtttatatatgccatcacttgcctaattagttttataaggaaatccgtgtcatcccgggtcatcctgccaatagaggcagcttccagttctcttgagcctcccgagggatgcattcccttcacaaagtgctggaagctggctttcctggagctccagggtcagggaccattttcctttttttatcatggaaatgaaaaagtcagtgtcagggaggtggctgactgtacgacagtcctgattattgacttatttctcttaccttaaaacttgagttatttcatcgtaaaattgcaggcaggaaaaatatatagaagcagtagccttcagattgaggatgaagaaatctctctgaacttcaaggaaatttggaaatgagcaaaaattttgaaaacatttgaaaatggaatttatagccctaataaaaaatgcagttaggtgtatcaacattttgattcctagaccaagcacagtgcctggcatataatagatggctaattaatttcattgaacgaatacctaagtagatgatggatgaatgccactggaacataatgtccatgagggcagtgttgctgatatttctagcatcatctggaaggtgctcagtaactacattctgagtgaatgactgagtgccagtaaaagataagctattgcgttatctttttttgctttttttttttttttgagatggagtttcactctgtcactcaagctggagtgcgcacgtggcactatctcagctcactgcaacttccacctcctgggttcaggcgattctcctgcctcaacctctcgagtagctgggactacaggcacgtgccaccacgcctggctaatttttttgtgtttttagtagagacagggtttcaccgtgttagctaggatggtctcgatctcctgacctagtgatctgcccaccttggcctcccaaagtgctaagattacaggcctgagccaccacgccctgctgagatatcttttttaaattaaaaaaaaaaaattagagacagagtcttgctatattgcccgggatggacttttgaactcttgggctcaagcttcttgcttcagcctcccaagtggttggttttacaggtttgcgccactgtgcctggctgttgggtggattttagtatgaaaactacagatcctaagagatgatccctgggcatatcaacaaagtatatgttttaaaaagccaagcttattagaaatattatgtcctatgatactggaaatccatttttatttgaaaatattaaatagagttgacatgttgaattttttagtatagattaaggcactagttcttaggatggcttttggtgcagtgactcacgcttgtaatcccagcactttgggaggccgaggcaagcagatcacttgaggtcaggagttcgagaccagccctggccaacatggttaaaccccatctctactaaaaatacaaaaaattagctgggcgtggtggctcacacctgtaatcccagctactccagaggctgaggcaggagaatcacttgaacgcgggaggcggaggttgcagggagccaagatcatgccactgcactccagcctgggtgacagagcaagactccatctaaaaaaaaaaaaaaaattattggggactctaaagagttttatttacatagattttatctactgatattggtcatattagaaatttaagatgagagattttaaagatttattaattgatttaaaatagtaatagtaatccctttatacagttacacaaactacataattttatgaaaaaggacattttccctaacaaaaaaaatttagtgggaagagtggtgttttacatccctcttctgtctgacttaaataaaacatagttggactctcagctgcttctgcttcaatctgttgtgatatgttttggttgaagtgtatgtctaacacatatatgtaattgaaaaaaggagggaatattttaatagctttttcacgtaactggagatattctttgatacttttgatagtggtcgttggcaagtaagtttctcaaaggttggttgcaaggtagagaatgaaaccgtgtctgtgtttcatattggtccatcttatgtgttgaatggctcttttatgtgttggtgtgaccgcattctttagtttggaaaacactatttcattgagttctgcaggttcttctaaatgttgacacatttcattattcaacatcaaaaaagtcacaattattagtatcaccatcagtctcatcaaagagcctttaagtattattaggaagccgtcaagctgacggtagatgcacattttctaagattgtgtttttcacttggaaaactttattgtatttcaaaaaagtatctgccaaatatccaagtctaagcaaccatattgtagttgttcttttgagtcaaagtggtgtttcatggagagagtggctgctcagctcaagacagccctcatccctggagtgtagccaaatgctttatgtgtcagaatatttactcagaattctgaacctttttttttttttttttttgagacaaagtcttgctctgtgcccaggctggagtgcagtggcccagtcttagctcactgcaacctccacctcctgggttcaagcgattctactgcctcagacttatgagtagctgggattacaggcacacgccaccacgcccggctaatttttatagttttagtagagatggggtttcaccatgtttgccaggctggtctccaactcctggcctcatgtgatccacctgccttggcctcgtaaagtgctgtgattataggtgtgagccaccatgcctggcccagaatcaataattgttaatgcttcatcgagactttcttaaatgaaactggcataaaagacaacaaaaagcccctgggatttcatggtgggaagaacataattcctgctagtaccgcctggcactgtcaccttgactcaggctaaggttcctgctgtcacaccaccattgctcttgcaccatcagtgcaaacgtcaacacaaggaaaaaggcaaatagtggctcagtattatcattaaagtggtttgatcatgaggacccttaagggtttgtggagcatactttgaggcacactttgatttaagaggttagaaacatcacattaaaattcatactaataaagtgaaattgtgccaattgcccaaaacagtgcatcaatccaaaactcttatttgtcttggagaaatgcattcaaaacatagtcaacaccactatctcattttgtctctgtgttgtgttaagatgggtttgcatactttcagcctcttagagcaggcagttggaacattatccagcagcaggttgaacagcagagggggagggcagctggaagttaggctaatctaacaaatgagtcatccacatgtggataatggagttgtaaaattactctcagctttagtcagcagcaaccaaactatacggttaaaaattacaggtctccaaaatagagacttcctgagaacttttagtatagcatttaactgagaatgtatcaagggtttggttgaggattttttcataaaacctttctgttctggaaggcaagtttgttattaagagcttcagtaatttctcttacgaagtgttcaaaatgcaccagaacctgaacacaatgtgagcagctgagtgttcatcttagctgcgtccatcaagtgaacggtttgctctcttcctgtccataatttgagagtcagcctaatggtgagtggacagtcatctaataaaatatttcatacctgtggcagcaggtataaagcaaatagtttatttttgctttccatgtaaagtttggcagtaaagtttttgtcttgagatttttgttttataagagaaattaaaattccttctgggcttttgctgttctcccctgaggatgaatatgctgcctgcctaccctgctaccccccgcatttggcaaggttgcacatgtcttagggatggaaaaccagtagccaacactaaaccaggcctgctgtgtagacctggcttggtgagtatggagctgttccgcagtagaggtttgcaaagaaaccatcacacccttgtttcctctctccttctggcttttcatttttcttctggccttttgcatggaagaaataagtcatcccttttgaacagtttgggtatggagtgtttgcccatgcggtagactctggcaggacagagagggttttcccgggcctttagttgtccaggtcctgtattctcacatctcctctgggctgctgactgcgcacaaacacaaaattcattcctccaatagaacagtgtttggcctggctcccaaaaactgctctcctcacttgcacggctttgattgagtgttaggtgtctctttggctgcctccagtgtctcttatttttagggccttcgttaatgtcttctgtgtgtgaaacatgaaaatggagccatggctgctggaattggaaacttagggtttttaggccaccattcccttatcacatggcgttatcaggttatttagttacagaggttaaaaaaaaagtccaccctaggagccggcgtgtgtggggaaaggagagagggggcagctgagcacctaatgggcagtgaaaaaagatattgtaactaaagctcgggctagtgtcctcagagcgatggcctttcaggtgctggcaggggtctgcttacagctcagcctggttacaaatgaggggataaattggtggtaacagtgcctttttatttttttcctttttcctttggaaactggcttttcacatgttggaaaacgagcttggatgctcggtgtaggtaacaggcaattctgatctgagaggaagggctcaggaaaggtgtgaccaaatgagccgtctgagtggtcagtcctgcccggggctcacccaggcagggagctggggtctttcatgtgggtgtccgtggacccacaggagacagggagggattgattacaggggagaccacttctgtttccctttcctaaaggaaacagaaaatggaaataaaaatctaaaattatgttattttccatttttggaattctgttcatttgtgtttggggccagttttattattttttttaatcttttttgagacaggatcttactctctcacccaggctgcagtgcagtggcaccgtcgtggctcactgcacccttgacctcccaggcttaagcgatcctcccacctcagcctcccaagtagctgggactataggtgcacacaaccacacctggctaatttttttttccccttggtagagatggggttttgctgtgttgcccaggctggccttgaactcctgggctcaagcaatctgcttgccttggcctcccaaactgctgggattacagacgtgaggcaccgtgactagcctgggaccagtttttgacggtccctagccttccatgagcattcgtgtgcaaatgcacagtccagaggcatgtttagttgactctggtttcctccctccctttcaatgtgtggaactcgcagcgttctttctctgcattgctgcgatctgccacacttctcgttttatcatggactgcagtacaatgtaattgtctgtgtgccagtttcctctgtcttactaaagtgtgaatgtttgatggaagaaactctgagtggacagggtctgtcataatcaccccagtattccccatcgtgtggtgctgagcttggtatgtagtggggagtgggtatgcagtgaatgtggaatgggtggatgcttgaatgagtacagccgaatttcctggccaggaaaaccatgaagtgttagcactgttctgattttacttcctccttcaggctatgggcgcgtgccaactgacagggcagggactgccatggctagtggctattacctaaactccagcccagttttggtgcccccgtttctgagtcctgagcaagtgttcctggcattgtgttggttcctatggtatgtgttttagtctgtgagactctttcctcagtttgaagatctgaaagtaaaatgtttcacccaaggtttttagattcgagagctcatcccgtaggccagggagagtgagtactaataccctatatgtggctgtgtttagaaagggctattgggaaacataaaaaatagattttgacattggaaacaaatacattttagtatgtgctgctaaagaaatgtgtgctataagctattctcctggggttataaatcattaaatattaactttttaaacgattaaacatgtgactatatcttattggttacaaataataaatgcctactcaaaccagcgtaaaccataaaagtagaatttgtataaggattcacagggtggtttatggggagaagggcaggaaatgctgccaggctacaagggagtctggaaccaggactagggcaataccaggagccaaggcactgctctttcaccccgagaaccctgggactcacccgtgcttctctcccagtatcagattcgttctctgtggcagtggttgggcttcctccacttccctgctcttagggtctaaactggcagtgtcacgtcgtgagcatacctctgccttcaagttcaaatgcagacagacacaagtctctgtttaaattcctgaggaagaatttggttggcccaatgtggtcagctgtctacccaagtccaatgaactctgctcatgggaatggggctggggaataaatgtggcttagagggctgacgtgagatcccagagtctggaagctatttcaaggttctggaaatagtctagtagggctacaaaactcagagcaagccatagggtccggacagtaccctatttcctttatttctaattattttctgctctgccttttgagggaactcatcagtgtcttcctgaggcctggaggcttttctgtgatcatgaaatgtactatctgaggcctggaggcttttctgtgaccatgaaatgaactatcaagagcagggcatgggctctgcagacagcccaggagttctctgctgcagggctaagtgataattctgctgaggcggttgacattcttctggttagctttagggcagatgaaagggaaagaatatcaggagaaaaaagagcatcttgaatttgtggtgttttttgaggttttttttttttttttttttttttgagatggagtctctctctgttgccaggctggagtgcagtggcgcaatctcagctcactgcaacctccgtctcctgggttcaagtgattctcctgcctcagcctcccgagtagctgggactacaggtgcgtgccaccacactcagctaatttttgtatttttggtagagacggggtttcaccatgttgaccaggctggtcttgaactcctgaccttgtgatccgcccgcctctaccttccaaagtgctgggattacaggaatgagccaccgtgcccggcctgagttgtattattttagggtttggggaggagggaagtggcgaagaatggtatatgaagggtgttcttgatttttcagagatgaaataattttatccagccatttatatttctatgtatttcttcggtatctgtttttaatatcctgttagacgttttagtctgtcaagagttattgctaattgtcaaccaactacctggttgcaatgaagataggttctttttatgccatgcactccagagatctactacacagctgggtggctatgatttgcattaaactaataaagtcccctggttaaaggggtatgtcctagatttaacatttgaaatcctttccattaagtgcagcacaagcagatctttctgcacattttggtgaagcttaaccatttttgatgactcattttgatcctaatctttaatttttctgattgcttttggtaaccttctatttgggctgtgtgccgaattttatgataggtatcctttagacggcagatataatcaggtgatttgattcagaaaaggagtttgctttcccttccgacttctgttttgaaagcaccaaggcactgggcatggtgactcatacctgtaatcccagcactttgggaggctgaggcgggtggatcacctgaggtgaagagttcaagaccagcctggccaacatggtgaaaccccgtctctactaagaatacaaaaattagccgggtgtggtggcctgctcctgtaatcccagctattcaggaggctgaggcgggagaattgcttgaacccgggaggcggaggttgcagtgagccaagatcgggccattgcactccagcctgggcgacagagcaagactctttctcaaagaaagcaccaaagaattcccccaatagaaacagtgtgtagaaaataatttggaaatgaaggaattaagatggtctgagatttttgtggcttgctctgtgttttatagccctggtgggctgcaaacaggtatcttgcttcagctctcagagcagcctcagtcactgggaactttttttttttcacggatgctgctttctcagcttctagaattgcctccttagtcctgagttagaatgtcagagacaggttttatgctactttgctggcaaggatcaccatcgcacacgtcatgtagtttatcttgaaattttatgatttgggaatcagattccttcaaataagtttgtgtcatctgttttgttgagagagctcgtggctaggatcgcagacgcgaacattgtttcttcctgaattgtgtccttgagttggttggtgtgtatctccagagtccattgtttcttttgcagaatgaaggaattggtctgcagtgatctcaaagataattccaacccagcacaccaggactcaaacttaagaaagaattatttttgttatgagtcatgtacatttagggttcttaccagacagaataattaaatacatgcagctctgctccatgcaggcaggctctgggtcctcacctctgcatacaggatgctgagcatggtagtggtttaatcaatactgttggtggtgtaaatggatgaatggtggccattctgaaacggctttgtaggatctaagctgtgttgggagccaatgtaagtctggtctctgtcatttggagtatattttgaaaatagaagattaaaacccctcttcatttaagttgccgtctaaggtcctggaccagccttggttcacccaggttttttcctctgcaggacattggctcacagaaaacagggctgcccccttttcctgcatatttggcctcggactgcctacttgactaatcagtttaagctcttccctcttaggccattaatcctatttctccagccgagaagcagcaggataatagtaatgtgtcctgtagctattaaaagatgatattgccttgcacataaataaagtacttttttttcctctgcaaaaggatgatcaaacaaatttaattttcatttatgcttttgcctttttgtgatatttctttgtatcttctagtacaatcaggggagaacatcatttttactgttattgatggttattttctacttgttttcagcatcctaacaaggtatttgctttcctatacatcgttacattttgtcatcctatgatgaactctcgttgctcgagggggcgaaaacagagtgaacgtggaaatgatctttggcatgtggtattttctgaaaaactgaatttcacaataagcacatttcgtggcatttgctaacaataatctccacattcctagaggtcagattttctcattgaacacatttttttttcttttcagtttatatatgcagaaagggcttcattaaaactgagatcattctcattcaatcttaagctggcagccaacccagatccttttaatccctgctgtatgtgctaatgaaaactcagggaagtgctgatgaaagggaggtggtgaggctccttcctctccttgcctggagacttaacctgtacatttctaggcttttcagagttaagttttgcacctgcttgtgcagtggtgatggagctcctgaggtatttctgcatttgcttcctgggtcttgaatttccaccattaaatttcagtctagtggcgggtgcatgggtgtgtgttacatcattctgagtttttttgtacatccaaaataattttgtcatcaccatgatcgtggctgccatcatcatttcgacttttgagagtcagtttatcctctcacccagcaaatctgcttttgagaattggccctaagcaagtaatcttgaatatggaggaagatttttgcacaatgaacctgcccattgctggtttattcataacagcaaaaacattggaaacatccttttccagttttgggggaaatgattcagtgatgattggtactgtatattcaagtaatagaatattaagtatcctttcaaatcattgcttaggataaatatggaaaaatgctcttgaaaatataccttcccaattataggaaagatagtaaattatattcacagtatgattaaagtgatgttttttttgagatggagttttgctcttgtcgcccgggctggagtgcaatggcatgatctccgctcactgcaacctccgcctcctgggttcaagtgattctcctgcctcagcctcccgagtagctgggatttcaggcacgtgccaccaagtccagctaatttttgtatttttagtagaggtggggttttgccatgttggccaagctggtctcaaactcctgatctcaggtgacccacccacctcagcctcccaaagtgctgggattataggcattagccaccacgcccatcggtgattttttttaaatctagtttttaaaatacctgaacagtgatggtgtaaaggacaagatgatagaagacttttttcttttcattttcttgattttctttatcatccacttttttaaaagacaccaacattatttgcataacaaaacaccatataggccggcacggtggctcacgcctgtaatcccagcactttgggaggccaaggcaggcagatcacaaggtcaggagatcgaggccatcctagctaacatggtgaaaccccatctctactaaaaatacaaaaaattagccgggcgtggtgtcgggtgcctgtagtcccagctactcgggaggctgacgcttgaacccaggaggcggaggttgcagtgagctgagatcgtgccactgcactccaacctgggtgacagagtgagactccgtctcaaaaaaacaaaaacaaaaacaaaacaaacaaaacaccatacagatggatatctaaaagtgaatgagacttgaaaatcagccagaaatgtttgctgtggtgataaacataacccttaaaatgattttttaaatatttttttaaaaaatagggtcttactccaatttcccagcctggagtgctactggagtggtgtgatttcagctcactgcagcctccacctcttgggctcaggtgattctcccaccttagcctcctgagtcgctgagactacagccacaccaccatgccctgctatttattgattttttacttttgggagagacggagttttgccatgttgcccatgctggtcttgaactcctgggctcaagtgatccacttgcctcagcctcccaaagtgctggggattataggcgtgagccaccacgcccagccaaaatgaattctttggggtccagaaatcttgtcttttgcaaagatagtttgatggggcagggttgctgggaaatgagggtcccaggctaacagttctctcaaatgtgcttcatggctcctgagtgccagctctgagtcatgggtataggaactggtggaaggagacagagagagagggtgctgaagctgggtggtgggggagggcactagaggcagctgtggtctaagtcacacttgggtcttgcatctggctttctgcttttattactattatactttttaatggcaatgagctgtagatacaaagccagctttgagttgttaagaataatgaggtctgtcctgacagtacaggcagcagaggcataagcaaataaatcccaatgtattataatatgcaattttatatttagacttcgaatgcattatgatcattataaaaaatgtctatttctaattctgttaaggaagatggtatagcagtaggggctttggaattacaacagggttgaatactggcgctacttgttagctgtggtttttggataagtaatttaacttttcctggcagagttttctcgtttataaaatagaaataatactacctttctcataggagtttgtgcttattaaatgagaggtaatgtatgtgtgattcatggtgtatgtttggtagatgatgattatcatgaataactagtaaagtaagtaatgtgatttaagttatgttattagaagtcccactgaatgccgtgtcaataggaacacagactcatactagtttggaagggaaatctggctcggattctaaacggtaccttggaagtgcagatggacaacagaatgattggagatgagtgccttggtaagccagttctttctggtgaacttggaagcagagaaaagagtaacaaaaattatggaatttaattatattaattagaattatatgatgattataatagaattgccttttgttctggagttaacattttataactttataattagatctcttgaacatttgaaaagttcaataagtacttgtttgtgtcatattagtctattctaattgatacacatgcacatagagcacaattttttttttttaagcccaaaaagtttattagcgttgggatgggatttgacgcactgaggttttccctggacaagattcttaccttctttgagggctgagtttaaatagttattcccaggagggcagaggaactcttccgttgtaattgaataataagtgtcattcttgggtaccagataaacttaactgatcacttaattgatgctttgaatggctgcataatgtgtaagtccttagaagccagagatgagatttgttcatattttgcccttctagtacctagaaggtactttgcacatggtaatgaatacatgtgtgaattaatagatggtaatctattacactctacccatttcctttctcaaagattcaagcctaaggctaacatgatattgagaagaagaaacgtaactaccttgctgttgacagtgtagcagcaaatgtaataatgtgtggaacttcagggtttcttgttcattcggtggtcagcatacaaaacatgcgtcagtaccttttttcttgtcctcttaaaattttatttctttacccccagagtgatgttggcacatttgctctgctgaaatgatttcaagagctcttcattgctgattcatttaatgattactgtccaaatggccccactcccacaaggaaaagtgtctccacattaacaagcactttcttctgcttgatttctatggttacatacgttgtgtcactttgaggagttggaaataaatttaacaggatattaggatgagagtacctttaaaaaaaagttctgctaaggaagtgtttcatcctggtgaataatgaaatcaggttaaaatttgtcttaaattaataatgactttcgacgtagtccttgttctcacatttcatgggctgattgcttttttattttagctgaggtcatgttaaaaccaaaataaagttatttgaaaatctagtgcaaaattttatttttctatcaatttgtgattcccagagcaaatttggggagagccaagtaaattaaaaagtgaatttaggtgatgttaagtctaagatagccctcaataaagatcttctcagaaaattcttgagtggcaccaacttttgtcactaatagcccacagacacgcgtcactttaattctttgaaaacctacactcaacagaaatgataaacttataaatgattttgcaatctgctgccggtttcttaaaaaaaattatcagtttcttagtttattctgaactggatttgatacacagaaaactggttttcctgcctgcttaggaatatatcacatcatgtaataagcctctcagagatgtagcattgagcagattaaggcctcatttatagaagaattccaccctggccatgtgggcctgaaactctggagggctttaacaatgtcttgaggtcattgtcatttaaagagatgactcagtggttttatttagtagaaataaatactaaataaataatctccacagattatccagaggggtaagttgaaggatgttgacagataactcagtaaattgcgtctcaaatattaataagtttattctatgccagcaccaaaaatatttcagagatgcttttaggcttctctcaagtatgtcgggaacagaaaaggattatagaaatatttatagtaggcataaacttgcacaaaagctcaaagtaccttaagcaagcttgttgcaattattcttttggagaactggattaagtaattatttcttgttgcctctgactatttaacctcctactaaactgcccattgtttaaatgtctcttatttagctctgtttttatcactccttaaatttaatattctcaaggccaaaattatagcagtgatggtcaggacatctttgaagacaattagattctgagaggataatttatatgtagaattaggaatattcatatcactcagaagtatcataaaaaccattctttcacaataacttttccactcaaacatcgccgaacttgattaccaagaccctaactgtatttcacttctttgcagtatttgaagttggagggaagggcttccacagctgaagagtttggctaaaccatgggaccctttcacattggctgagggggtgacagtgggtattgatccaagccagcccgcccttacttggttggaactctgttttagtacttgggggtgacaggggaaaggcctggagagcatcagtcctccatgagtcttagctgctccacgagaaaaatactcactgttttctcataggcattgccacagtattctctgacgagtgtttagcaggcatggcctggtctgggaaagtcctctattccttggccctgcctggaagttgtggtgcggggaggccatggattggaagaaaccctaaggtggatatccgaagggctcttaaatgttgcttgtggcagctgggaacagggatactaatgaggaaggacaagctcttcgatttcaggtggttcaggagcctcaggcaggagtcagatttaagggataagtggttcctattttcagtatctctcctccacaggtctttatggaaaatcttaaaacccactcttgtcatccgaactggataatgcaggttcttggcccttccagtgctacattgaaccaagggttcagaaacaattgagcggtgggtggtcagttccaaagtggcgcttagaggaagtctcgaagtgaagagggaggtttagggaatgagtttggagtcgtgttttcatttcttttggttgaaggaatttaagagtatcgtctttatctggttttatgtattgcttttctttttgtttggggtaggtgattaaaaatagaaaagtggggaaagagacaaatttagccttcaacaagctctcggtgatctgtgaccatattgttttcactgaagattatttacaacatgatgcggccttggttgctgctgagctggcttcagggcagtagataggaaggatgtttccaaggaaaactactctgaatgaacttgtccttgggtatgtgagtaactgatatcaaccaaaccaaatgtcaataagtcattcattgtgaatcatcctttttcggtcttgacactgcacgtaccagatcagttgatctctctcctttgtaagtctttcaaaagacgcatacattagattttttttttttttaggacagggtctcgctctgttgcccaggctggagtgcagtggtgtgaccctggctcactgttacctccgcttcctgggttcaagcaattctcctgcctcagtctctcgagtagctgggattacaggcacccgccaccacgcctggctaatttttgtattttagtagagatgaggtttcaccatattggccaggctgatcttgaactcctgacctcaagtgatccatccgcctcggcctcccaaaatgctaggattataggtgtgagccactgcgccagcccatacattggattttattttcctccaacagcgtggactctacccagtcttcctggttctggttttccaatagttttcttttcttgaaggtggtcactgtttcttaaatgtttatagatttactttagctttccattaagaaatcaagtaaatcagatgtacttgtcctaatgtagtaatatagataataaaattgttagtggttaatatttcctgaacatgttctctgcgtcaggcaccaatctaagtgggacttggctcagtttccacaaagccccatggaatctggtttacagagaacaatgtgagagtgtctgtttccccacagccttgctatagaggccatggtatcatctagtgacaattttcatcacctgctctattaagccacttgcgtgttctagaaggggttgagctctttctttctttctttctttcttttttgatacggagtttcgctcttgttgcccaggccagagtgcagtggcaccatcttgtctcactgcaacctctgcctcccgggttcaagcgattctcctgcctcagtctcctgagtagctggaattacaggcatgcgccaccacactggagtaactttttgtatttttagtagagactgggtttcatcatgttggccagactggtcttgaactccagacctcaggtgatccacccaccttggcctctcaaagtgcaggggattacaggcatgagccaccaccatgcccagctgggttgagctctttctcacctgtaccttttagtgccacttcctctgagcagactctcccactctttagccttcctgatgcctcttggctctccaggctgggtgtcatctgtcctctgctcaattgtcccacgatttccaatgttcaatgttataattgcctggtggttgttggatgccttcactggatcctgagctccttaaggttgagataagtctcacttttgtgtctcatgggcctgggacacaggagataacaggtgaagtctgttgatcttacctgatggggaaatgtattttttctgtctccctcaactagtgaggtgccttgcaggtttttttttttttttcctctttgttttttaattttttgagacagagtctcagtctatatagcccaggctggagtgcagtcgtgcgatcttggctcactgcgacctctgcctcccaggttcaagcaattcttatgcctcagtcagccgagtagttgggattacaggcatgtgccgccatgccaggctaatttttgtattttagtagagatgggattttgccatgttgtccaggctggtctcaaactcctggcctcaggggatccacccgcctcagcctcccgaagtgttgagattacaggtgtgagccactgtgcctggctgccttgcgggcttttaggcacctcaatgtctagttttgtcagaatagcatcctagaggtcttagaaatcttacctgttggagaaagttttaaagtgccccaaacatcccagcagttgtacatcctttcactcacactaaaattcatcctgttttgctttcacaggtatgtacattttgatgaaaagacactgcaaagatgagcaccagctagccaaattgtgtagtaaacattgcatgtctatctgtgtgtgttttattgttttgttattttatttagtcaacccttttgttattttaccataagttcatttacacagggtaatcttctcccattacagttgcatggaaggaatcttagaggaaacagttactgattttcttagtgtgagaccagaaaaatgaagcgttggtattggccttggggatttgctgtcctttatcctcggtaaagcaaaccagccatccgaatgtaaaggcagctcctttctttccataagtaataagtcatgatttcttaatgaggcaaattatctatcatttagtgaattcatagtatttgttacaagtaaattcattaagaaagagcgctattccaataaagccaatttaattacgcagacaattaaggggcatcttccatgtgctctgcactgtgctagccacggggtggatatagaaatggacaaactagggatgggcttatttatttatttatttgtttgttttgagacggagtctcaccctgtcacccaggctggagtgcagtggcacgatcttggctcactgcaacctctgcctcccgggttcaaacgattcttctgcctcagcctcccgagtacctgggactacaggcgcgtgccaccatgcctggctaatttttgtatttttagtagagatggggtttcagcatattggccaggctggtctgaaactcctgaccttgtgatctgcctgccttggcctcccaaattgctgggattacaggcatgagtcaccgtgcctggcctggaatgggctttttaaaggagattatagccaagggcagtggtgtgcacctgtagtcccagctactcaggaggctgaggcaggaggatcacttgagctcaggagcactgagctgtagtgcactgtgccagttgagtgcactaagtttggcatcaatatggtgacctcccaggagtcggggaccaccaggttgcctgagggaggtgtgaacctacccaggtcagaactggagcagatcaagactcccatgctgatcagtagtgggatctcacctgtgaatagccactgcactccagcctgaccaacatagaccccatctcaatcaatcagtaaattcatttattcattcataggaatcacagacaagggagtcacttaccataaaaaatatacaaaataaatgactccagaggcataaaaccaaaggggttttgtgccaaaaaataggaatcaaggaagtaacatttgaatttgatcttagggaatggatgtaccttaaacaagtagccctgtatggagaagaggagagagggaacgataatgaagaacagagacgtggaggccggaagatgccagctctaccagaaaaagtagcaaaagtcaatgtgattgaagtagggggagtgcgggagcagggagggtgtgattgatgcctggcagctgcccgtaacgtatgatgcagtatggttttcgcctgatttggggtttccagttctccctggctgctgacggggctccctcaggcacacattaatggattcactcagccagtgatttttctgttttctctttcatttccacttttctatcccatcatggttttctgcataaccccatctgattttagaccaattttgatgtgatttttttcttctacgtgagtggctcagtgaaggctttcgaatactattttcccacttgcatactgtttcagaactgaagaaggtaaaatctaattgtaccaggtttttgaaaagcagtagtttccattgtatgtgtttaaaaagtccccaaaggtctatctgtaagaatctttgaaaagacacattgcagcccaaaccttaggagaaaagaaaaaggggacttcacattgtaaaagcagcatttatctttgcatcttgaagttcctagaataggctctcgcctttataagtggagttttcttgtggcttttgtggggagaattcactagaattagggcagattttctggaaagtcccgaaattcagtgttctgttggatttctggcatctattgagcaagacagttgggataatgagtcttggtattaaatgtattctacgggagggaggagagagaagtgggaggaaggtgtatccgtcttgctggcttcctgcagcttaagtaggaggaagaaaaggagagggtgtgagtagatgacccaagccctggactaagccctttaggtacatgatctcatttaatccccttttcagaggaaactgcctgagatatgtttgacccaggctttgtgctcttagccactaaatggcttccctttactgatgattttactctgcctttatcctatagttacttataggcagctatatttacttcctccaaatagattaactctttgtatactctttggtacctggaataagtcctgtgtaatcctaaacgctcaataaatatttcttaaaatgaagataattctccttgacagaaaattgatcttactgagcatatatccactgagaaaacagacgtatgaatgtttaatactccctgattatcgtatgctttcttatttaagcagaagtattaaacgcatgccaaaggctcacataaatgatttattatgcaccaattaacgttatctgagccatggtttttctttgttgttatgaattgagcattgacagcaaggcagcactcatttaccttttgtttctatgcagaaaacatttcaaataggcaactgttgtctctcctgagtagtctgagaaatgtgaatggagacatttgtattaggtgtccatctcgtgaccaatatgctttgtacttttgaagtttgctttatccttaagattgtgagaactgtaaatctgccactggaaccatccctgcagattgtcataatgtgatcagctctaaaaagcttcctgctttttagagtgtgtacccttaaggataacaatcatatagataaccttttagatgtcaacacaggcgatctttttatgtgttttattcatgatgcaatttacagtacttaaaggaaaaaaaatccagaagccttacaaggtctttaataagtacaaatatagattgctataggtagaaagtatgctttaaagcaaacttttttacaccattttctgaggcttttattaattactctgttttccagcgaggctttttcatagggatatgcacctgactaacttattaaaagtaaattgcctttgtggtcttattttcagggcgtggtgctgaagttagaaggcgattgggcagttttgttttctacagagaaaacacaatctgggaagagatcttaattgacctattagctgaattgaggagatgaattagttgtagaaaatttgtcaaagttaaataatagcagtgagtttgaaggggtgagctagcagaactagaagagaaaggagaatgagaagtaactcacaggccagctgcataatgggtagagcgagctataggtgaactgtgagtagctggcttgctctgttggctgaattccttgaaaagaaaggatgagacatttttactccagtaaatcttatgtgtatctcttgtggattgaagaaattattgactcaatatgatttaagttagagacaaagcacactcacaaaattccaaaatcagtcttttaaaaaaagcacttcatagtgagcaaattttaaattaaatcatcatctaaattgtgacatgcattgagaggaacaggtgaggtttttactccacgttggtctccatgtaacaataattttcatgtcaaaatgatcttttcaggttttcaggttgccctcttcccctctcctttctgttttcagataattggatgaaagtaaaatcttttgaaaacattgctttcagcgtgccaaaagcaaggcatttataactggcctcaatttgcaaacaatttaggagtttgataagtttctaacaggaccatggtgagttcacaaaatctgatttctttaatggaaacaaaaagtgtgctttgtggaagttgatgttaggaattacaaagaaacccactgttcagcacaagtgcgcaggcctttggccaagaattcctcagcttggaacctgagctaagaaaaagcccctggtcacacctgtggataaaagacttagtgagagctgggaggacaggtgaaaaatgatggtttggaagccagagactgttaaatagaagtgacagaggtgagagaggtatccaggaaaagccactgctgtacctaaaacagtagttaaaaggaattaaaaatgtaaagtcttagacgtttggaactctgctatttctgtacctttctaaatgatcttctcagcccttcagagtctgttacactgttgcattctaaaagatggtcttgatagtaaatggggtaaaatggtctcatcaggtctatttttctctcctggttaaatgtctacttaggttaaataaaagctgtcctgttgtagtcaaaacaattagttcctggcctcataagaccaggtttgaatctgagctgtgtttttgctggctttatggtattgggcaagttggcaatgttcaacttaattatgtcttctcatttgctaaatggataccaatttatgagactatgctcacaaacctaaagtgaacaggtgaaagaccctctgcaaaatagctgctcaataaactgttgcatgctaatcctaaataagcacttaagaggtatcagttacaatgaattccctgtgtttataaaataacttacaggtgcagttcctcttcatagggagtaacatgaatgagtaacatcacatcaccatactgttctgagaggtacttggcagattggtcaatactgtgaactcagaactccaaccgtgggatcccagccatccattcagtggcatttctaccagaacatctgtgtaagagattgaaggttaattttggcaattcttaccttgtacagaattctgtgcattttaagttaaattactgtaggtgattggggattttgaaaatctaggctcaattgttgacaattccagtgacctttggtctggagcaaatcccttagcctatatatatacacacatatatgtgtgtgtgtgtgtgtttatctatatgtgtgtgtatatatgtgtgtgtgtgtgtgtgtgtatatgtatatatatatatatatatatatttttttttttttttttttttttttggagacagggtctctgtcacccaggctggagtgcagtggtgcgatctcgactcaaggcaacctccatctcccaggctcaagtgatcctcccacctcagcctcctgagtagctgggactacaggcatacaccaccacatccggctaatttttgtatttttttgtagagacgggattgcgctatgttgtccaggctggtctcgaactcctgagctcaagtaatctgcccaccccagcctcccaaagtgctgagattacaggcataagccaccatgcctggtctcttagcctgcatatttcatgtttctcgttcataatataaagacagaaaaggtgcttcctatgggaagatagatgtggacacaatttcacaaattaagttttatacaaatgtaaagtactgcaattcatgttgacctctcagcttagttggttttagagtaaaggggttagctagaggcctgagtcttgctccctggcctggcccaaattacctgacccaggagacatctcaacctctctagcttttagtttcgtaatctgtagatcgtgaggggggttgactccatgattccgtgagctttcttctcaagcatctcattctagaatattccatcggtccttttctgtcaccttcttcccaagtggttgtgaaagggtggcttgtaggcattaggccagagctgtgtgttagccataattcagataatacagcttataattcagcttgtgttgatcagaaactctgcctaagggaaggcccaggtaaaacctgtaaagtcctggagtttcatcacagatgatgctattgcagagcctccaagattttgcctcttttttatgagctttggtgactaccccagcctaatgaggtccaagatatcccagtacttccacgggaggatcatgtgaagattgctgtctggttccaaaattccctcctaaaacagcaagggtggcacctggggaggaggagggacctgggggaggaggagggacctgtgagaggggtatcagtgattctgcaggtgattcctcctcttcctgtcctcttattaaaattccctgaggctgacttcagctagatgttgatcagattaaagcagttggtgctgggatggattaataagcttgaaattttttaacttggatgccttgaggtacttatttcatccccaagcattttccatctctatcccaactagtccagtaaaacctgtggcattgctgagcaataagcaatgcacctgcccgttttcactattggatctggctctgtccactcttttctgggagaacagaggggatgggtggcgtgatggcccactgagtgctgggcttctccatcctccatctgagttggctgcattcctgtcccaggtgtcctctgcctctgttgagcccctgccactgctacctccaagtgtccttccttccctccacatgcagaatggagctttccatccccaaagaactcgagcagcctgtttgcatcactgccaggagacctgtttggtactgccaagcactgcaggtatttctagctcagttgtcttatcattagggtgaacatatttatcctctaaaccaggacacttttgaaagtgaagggaggagagccattaataattaagctgggacaacagtcataaaccaggattgtctgggcagactcaaacatgtggtcgccctacttgttccctgtacttgatggaagccttcctgacggtaaggacagtccttccacatcccctcaacctccacagtggcacagacataattatattgaatgaagcgataaataaagctattttgatactttttttttttttttttttttgagatggagtcttgctctgtcgcccaggctggagtgcagtggcatgatctcggcttactgcaacctctgcctcccgggttcaagcaattttcctgcctcagcctctggagtagctgggactacgggtgcacaccaccatagctggctattttgataagctttaatgacagggatggcgaacagtggttaacagttagtgaggcattgccaggtgcagtatgtgaggtcagcactttgtataattatttaatcttcacaatagcgctatagatttgatactattttttttcttttcttttcttttttttttttttttttttgagacagggtctcactctgtcgcccaagatgcgtgtagtggtgtgatcataggtcactgcaacctggaactcccaggctcaagcaatccttccacctcagactcccaagtagctgggactacaggtgcatgccaccatgcccggctaacattttatgttttgtagagacggggtctcattatgttgcccaggctggtcttgaactcctggactcaagcgatccaccactgcccatcctatttttctgtttttcagagaagaatattgatgcctagagaagttaagttgcttgagagcagagagtaagcagcaaagctagggttcaaacccagagtgtaatctcataggtgctgtattatacagataagctagatgcaggggcaggctggtttgtaagagggcatgttgcctgtagcatttctccttagtgaatctccgaaacaaatcacatcctgtttatttccaacaaaagagaacaaatttgggattatatctgattatagcatgcgagtagcaaataagatatgatgtatgtatttttgcagttttttctttccaagttcccccatctttggccaaaatatcacattttaaaccaatgaagagttaaatctagagttaatcacttagcatcagcagtgcagccagaattctcatctcctgattctaaaactgcctgaccctaccctggagtcactgatcaggttgagaggagttcagaatgaagagagaattgtttcaaccacctgttctgcatgagagcctttcaccattttctgtgtgtttgtgaaatgaccattctgaagttcagatccacatataagactcattcaaaatgatcttcctcaatggaaaccgggggtgagatttgaacctgagagagacagtctgctctggttgatgaacagcatagctctggacccagactgcctgggtttacatctcagctctgccacttctaactttgtgattcaggcaaattatttaactcccagtttttttatctgtaacatggggataataacagcataagagcactagccacactggatggctataagattgaaatcaattactatgtgtaaaaatcttagaatagggcctggcataaagcgacactgtgactgttttatctgtaatatatatgttgctttttaaaggccactaggtgatacattagagcaggcagggtgccatcgaatgacccaaccctttgtcatctggcaatattgcctaaaatccagacggtggattttcaccttcaaagtggttctttgggcacaaggcaagtcttccgaaactccctacttgatgcctggcgtattataggcgtctcatattttttgttaaattgaactgaaaaattgaagcgctttgtatctaaacaaatgtagaaaagtgagacgctgtatccagggtctgaagttgaaaagatttaaaatgtggatggaaacttcagggatgggggttgcatgggatgtttgtaattacttatggatgatatgaagatagtacctgctgtattttaccatgtatatgagtctcgtggggacttcatttaaaaatgtgtcttctgcatctgagatcctgactcaggaggtctagatgggacccaggaatctgcactgacacaggcggtctgtgaaccagacttggagaaacactattttagtccagcgtcttggatgcatgagcttatagttccttgacaatggcaaaattagaagtctaactgaaatcacctacaagatgtgcatgtattacatataccattggagacacccactcggagttttcttattgagagaacatttcagttttgatttcataggtaattgggcggtactgatgaatcactaggttttttttaaatgtaagcagtgatacatccacaaacactttcctgagaggtgatagtctcacgcaaaatttaagaaacttttattcttggcttaatctttgtgactgtattttgtgttatgtgtattctttattttgagacatcctgaaatccttaaattttgctcattttcttaaaagccaaatcccacataactatgtaagtatattctttttcagcagttttctctggggagtttcctaaataaatgaattgaatgggggagccatgatgaatgggtcagtatgctcattgcagtgccatctcttaaagggataaactggcagcaatctaaaagggcaacaggccaggcgcagtggctcgcacctgtaatcccagtactttgggaagccgaggcaggcagatcacttgaggtcaggaattcgagaccagcctgcccaacacggtgaaaaccctgcctctactaaaatacaaaaattagccgggcttggtggcgggcacctataatcccagctacttgggaggctgagttccagcagaattgctggaacctgggaggtggaggttgcagtgagtcaagattgcgccactgcactccagcctgggtgacagagtgagactccttctcaaaaaagaggggaacaaagggagagagattgatttatggctcacatgcataataaatatacctaacaattaactatgaaaatgtagtgtatttgctgtcatgaaaagatgtttgataatcatcttttatgtaagtgaacaagcatgttaaagaacacattgtaaaaaaatatcataatacagccagtatttactgagtacttgctatgtggtggacacttggaacgcattatctcatttaatcctcccgtaaacctgtgtgtttaaagtactattatctgtattttctgatgagagacttgtggcccagagagggtaagtgacttgtccaaggtcgtacagcctgtaaatgttccccaaaagcccatgtactttcttcactgtcatgcattactgcacctggggcagtagctacacactttgtttaaagggcctgtatgaataccccaaaatattcatgatatcgattcaagttgtaggagtttggtgatttgattaatttttctttctgcttccctgcattttcttttttcttccaacagccagttattaagtcaaccaacaaataattctaatggcttcctaaatgtagaaagttggttaattttggtattgcttttgccattcagggatttacatagggacaatcacagagatgctaaaccagttaacctttgtaggaaagcggccattaaaaccctccctcctgttttcacgatcactttcatcctaaaatcgggtagattacctctgcgtttgtaacatcttcagtattcaaggcttggatgtaggagagaagccagtttaaatggtcctcacttgtttagcacctacttatcaccccgggagcccttagagttaataaggagcccagtgcaccggtgatcagctactttatttccagaagtgggatgtgggggccctgctgctgcagtgggggtttgagggcagctgttcacctgggtgcatgtcctggatctcatgttgggggcggcagtgctcccctggaaggggatgagccagggaggagtccgcaagggaggatgggccagggagggagggctctgaagcacacccttgctccctgggcagggtctgcatccagggctccttccttccgcctggagctttcccatgaatccttcctccaccacctcctcaactagcacctccagctcgccccgcctgacccagctccctcagcccatgtgtccccgctttgccagctcttctgtgtgctaagtggcacggactgctgtctgtggcttcagtccccggtgggggagcgctggggtgttccgcctcctaagagactgttggttgagggcccgcatatctgtttctgggtttggtgctatcaaggtcacacgggtgtcgccccagactcctctgctgcttacagggcctcatgctggcgtcaccatggcatcagcccagcctagtggagacttgctatctgatttccatcatcctccattcccctttgcaccgcagccccctgaattaattaagcaagcaagcaaacaatcaagtcttgttcgacactgttaaagggagcaggcttcctggtctgtggggagctgcaggggagggatgtgatgacttaattacaactgccacttgactgagtgtctgctaagtgcagggtgctgagttgcattcttttttttttttttttttttctttctgagacacggtcttgctctgtcgtccaggctggagcacagtggcttgatcttggctcactgcaacctctgcttcctgggttcaagcagttctcatgtgtcagtctcccgagtagctgggactacaggcacttgccaccatgcctggccaattttttatttgtatttttagtagagatgggatttcaccatgctgcccagggtggtctcaaactcctggcctcaagaaatctgcccgccttggcctctcgaagtgctgggattacaggcatgagacaccgcacccggccttagttgcattctttattctgttgaatctttatcctttctgcatggtatgcagccttgaggggggtaatagcttaatgggagaatttatagttttacctgtatattcggtggaagatttcaggtgagcagaagttctgggaggattaagcgtcgagggagatcttgagaatgaacacagttgaaaatgaaatcagtccagttgtaagtaataagtgatcgaggaaaaggaagttccttcacctggttaatgaatatttattgcctgtcacccggaaaaaccctggtctcagaagacttaagggtaccgggtttgtacaacaggcagcttttgcattggacttgctggctgaagccagatacctacatgggctgtatagtgatggatgcttcattcttccttggtctgcttggttggaagtggagtcgatggtgcttctagctgatccccttacctctgaattttgtcccggtagctggtgactccttggtgaagtcagtttaagtctctgggaaaagcatcccatgcatatcatattccaaatgttctgtgtaagccccaggtttctttcacaggccttgtgttattagagttctgggggcagttcttgagggcatgtgtcttttctgccaatatttaaaatagttgttggctttaggcttgttttacacttcaggtcatctacaaaggaaatgttaatttgggggaaaagagatgcaatgaagagataaatatataaagatacagaggctcataaacactctggttcacagctcctggccagccctgtccataggagccatatggacccggcatgtggcttaatcctcgtaagcctgggtccctcagacaactgtgaagggggatattgctacctgcttgctaacatgctgagctgtgaagataactgaggtcatggataatgaagtgctgggcacttgcaaaacatgatttacaatctcagcaaagacttcattgtttattcagtatatatttattgacttccttctgtgtgctgggtacagagccacataccagctctccttggagtgtagtccctgggcaggaagcttcagcctgatggaaacactgtttcctaggtttcctgggccctgctgaagccggctgcatcagaatcttcaggaatcagtgtttaaccaccctcccctgactgatacctagtcatgtttgagaaggccccctggcacagtaggagaggttcagagacaagctaactgctatgggcgaggctggcacaggcagtggaaggtggtagtaaaagaacaggtggtctggcctggcgcggtggctcacgcctgtaatcccagcactttgggagaccaaggcgggtggatcacctgaggtcaggagttcaagaccgggctggccaacatggtaaaaccccatctcttctaaaactacaaaaattatctgggcatggtggtgggcgcctgtaagtccagctacttgggaggctgaggcaggagaatcgcttgaacctgggaggcagagactgcacagaggctgcagtgagccgagatcatgccactgcacttcagcctgggtgacagagcgagactctgtctcaaaaaaaaaaaaattgaataggtcgtctgctgggtgaggacccctccaccccagctctcatcccctggcccgagggttggagcactagacttcatgtaccagttcaggatatgcatatctggggagccgtcctgggcatcggcatctgggagagggggtgaggatgggtgggggtccccatgtaagtcctttcttcaggttgtggcttctgcatagctccttgttgtgtggacctgtgagtacacaccctggaaaggcaagtcaaggcctcctctctgctggtttcaagtggtggagaagccctgcatgactgaggcagagaagatgctggaaactgtggcaccaaaccacctcagagcttgagttcagtcccctgcaaaatcccaaagcctccggatttatttatttatttatttatttatttgagatggagtttcactcttgtcgcccaggctggaatgcaatggcatgatctcagctcactgcaacctctgccttccaggttcaagcgattttcctgcctcagcctcccaagtagctggaattacaggtgtgtgccaccacgcccagctaattttgtatttttagtagagatggggttttgccatgttggccaggctgggctcgaactcttgacctcaggtgatcctcctgcctcagccttccaaagtgctgggattacaggcatgagtcgctgtgtcaggccccaaagcctcaggattttagagcgttgtcaatccccttactctcttggccacctcagaaaaccaagaaacaggaatttacttgtcccaggtctatctggggctgagctaatgcagagcctaggtacacagctgcttttatatatatagatatacgtgtatatatatacatgtatacatgtatatacgtatatatgtatatatataatgcctatattatgtatatataatgcctatattacatatataatatctatattacatatatgtctatattttatatatataatgtctatattatatatatgtctatattatatatataatgtctatattatatatataaaatgtctattatatatatataaagtctatgttttatatatatatatatatatatttttttttttttttttttttgaggcaggacctcactctgtctcccaggctgcaggttgctaattaatttttttcttttaatagagacagattctcactacattgcccaggctggtcttgaactcctggcctcaagtgatcctcccccttcaacctcccaaagtactgggattaggcatgagcccctatccctggcctgctgcttattattgtcattactgttcatcatggtttactgtgaatggataaaagggaaagttaagaaccattgatgggcacattatattgtaccccacatgttaatataaaggttcttctaggctgggtgtggtggcttacgcctgtaatcccagcactttgggaggcccaagtgggtggatcacctgaggtgaggagttcgagaccagcctgggcaacatggcaaaaccctgtctctactaaaaatacaaaaattagctggctgtggtggcgtgtgcctgtagtctcagctactcaggaggctgaggcaggagaatcgcttgaacctggaaggcagtgagctgagattgggccactacactccagcctgggcgacagagcgagactctgtatcaaaaaaatgttcttctgatttttttccctctatcacatatgccatttaaaatataagggatatatggaggtatgattcatgtatcataaaattcaccattttggtggttttttagtattcacggaattgaatgactattaataccatctactttggaacatttttgtcactccagaaagaaaccccagaccccttagcaatcactgtctattctccctctctgtagcccctggcaaccatgaatctactttctgtctctttgaatttgcctagtttgtacacttcatataaatgtaattgagcaggctgggcgtaaagtctcacgcctgtaatcctagcactttgggagaccaaggcgggcaaatcattgaggccaggagttcaagactgtcctgtccaacatggtgtgaaacccggtctctactaaaaatacaaaaattagcctggcgtggtggcacatggctgtaatcccagctacttgggagggtgaggcaggagaaatgcttgaactcaggaggcagaggttgcagtgagccaagatcacaccactacactccaacctaagcgacagagcgagactccatctcaaaaaaaaaaaaaaagtaatgatataatatgtggcttttactgtctggcttctttcacttagcattacatttttaaggttcatttatactgcagaatgaatcagtacttcacccctttttatggcttaatagtaattgattttatttatcagttggtagacagttgagttgtttatactttgactattatgaacagtgctgctgtgaacattcagttgtgcatgagtttttttgtggacgtgtgtgttcattcctctcgggtatatacctaggactgaaattgctggatcatatgttaattctgtggttaacattttaaggaattgccaagctgttttccaaagaagcggccccattttacaatcctaccagcagtatggtagagttcatgtttctccacatcttcaccaacatttattgttcatcctttttatttagtcagcctggtaagaccaatgatgctgagcatcttttcatgtgcttatcagccatatgtgttttggagaaatgtttcttcatattctttgcccattgtttaattgggttgtctttttattgttgagttggaagagttatttatatattctaaacatgaatccctttatcaggtacaggatttgcagataattttctcctattctgtgagttgtcttttagtgatgccctttgaagcttcactaattgtaattttgtaaggaacaaatgtaaattttataccaggctgcactttttgcctgttcggttttggattttcttattgttggtatcattcatgaaagacttagcagcatttcattggttaaagctaacttcaattttgaggaagtccagtttgtctttttttgggaggtcggtcacttatgcttttggcgtcatagccaagaaaccattgccaaatctaaggtcatggatattcctttgttccaagaattttaaagtgttagcaactacacttaggtctgtgatcttttcgagttaatttttgaggtctaatttctattaaaagtgatctttagtcaaggatattgaagtataaagctaaaaaaaaaatagccttgatttttctaaaatggactgtgatactcagctctgtcctgtcaattactagtcacaggatgctaaaattataggtttagttttttaagggaataaataaatgcctcaatctcaaattaattttgctctgaaattgagctgactactaagacgagatccaatttaggaagtgttttgacattacccccagtgagcaatttgagaagcacataagcaaaaataagaaagcattcatgtgggctgcttcatagggtttttttttttttaagtgttgtattcaaccttatgagaaacacttgaaagtatgcaacttgattgtctgcccatacatacatatgttcggatgtgtaggtacaatttctgtagttttactcagggagtaagtgatgtatctcctcaggttcctaataattcccttttcaaaaatgaataaaataatattagatacctcatggggttcttgtgaggattagaaaagtttattaaaagggttggaataaacctgccacttagtaaatgcttataaactgcttactgttattaagtattccatttatttatcctgctatttccagtacattttagccaccagcataatcagtacttctcacttaatgttaaatactgctatatttttgaattattgtataaatatatgctaattatgatttttgcctgcagtaaaggaataataaacagttctcatgaataacttaagtctaataatgtttttattgttttataacatatttttcatctaattgtaattacttaaattcagaaaagcaattgtagaactgggtagcagagtgttttggtgtgttacttgtcctgaatcacgatagtttaaccaatgaaatgatgctagatcttctgtgaatgcacccaaaataaaaagcaaaaccaaatgggcaaaaatacagtctcatataagatttacatttgttccttataaagaatctaaggtatttttattttttatttttctttttttttttttggagacagggtctctttctgtcactcacgctagagtacagtggcaccatcatagctcactgtagccttgaactcctgggctcaagagatcctcttgcttcagcctccagaatagcagggactacaggtgcaagccaccacgcccagctaagttttatattttttttgtagagctggggtctcgctatgttggctgggctggtctcaaactcttggcctcaagcagtccccctgcctcggcctcccaaagtgctgggattacaagtgtgagccactgtgcctggccaggtgtctactttctctcccagaccaaacaggagaaaagttctgaatttgaaagggaaactcatggagcattttgaagatagctttaggccaattatgagtcagtttttctagcttggagttcaaggagcaaagacggtttgtttggatggatgacctgtggaaggactaaatccacctggtggaaggttcaggatgacaaccccatggacatccaggtagaaatgaaatgaccactgggcatcagcatgagagggagggccatgaagtttaaatttgagaggaggagaaggattggacaatcaaggttgtaaaggtagcttgaggccagtttggacttcattccatatcttgctctattctacaaggagtcagatttgcctatgaatgtacttatgtagcatggagcagcaaaatagatgtggatttgctaacacataaagctaaaatttaatagaccatccccactgtcttccaggttttcaattttactgccctgcttgctggcttctaagaaatagtttagcttcttttaccatcactttttagacattctgtgatttctctctgacctgttgtttccaaagcaacagcatgtggccagtcaaaataggatttcactcttgtttgtggagctctgtagtaattaggaaaggattcgaaactccatttgaaacggaggctggtaatacaatgatgtgttggatgtttctcagtggagaataaggtgctccaaaaccatggcagcaaaatactaaatgttgtgagagagatggtgatgtcttcctctgtttgtcaccattatgggaaacttttagatgtggattaactttgcacagatggagcggtgcaaggcaaggaaggttatcctgggggagctgctttggtggagaaaacctggtgtcctgccaaaccttggccttcagagtgaccctagggctggtcttccacattgtggaagagacagacctgctagtcttgtgatctctactcgggggcaatgcactgaagagaaatgcttttagttttgagtaaagagatagtcattaaatattggcttcagctattatttatttatttagacagagtctcactctgttgcccaggctggagtgcagtggcacaatctcagctcactgcaacttcacctcccaggcttaagcgattctcctgcctcagtctcccgagtagccgggactacaggcgcgtgccaccatgcccggctgatatttgtatttttagtagagatggggtttcaccatgtcagccaggctggtcttgaactcctgacctcaagtgatttgcctgcctcagcctcccaaagtgctgggattacagcaggccactgcgcccagctgccatttatttttatttttataaaaatatgtgtaataataagacagaaaaaatagggagtagacaaaagaagtaacttaaacatagtggttctcaatcagggatgattttgcttcccaggagacacctgacagtgtctggagacattttttattgttatactggggctggagggctgctactggcgtctagtgggtagaggttagggatgctgctcaacatcctgtatgtactggacagacacccccccattaccaccaacaagaaagagtgatccagcccaaaatgccagtagtgccaaggctgagaaattctgcaagaatccacccctaacacataataatcccacccctaattgcgttatgatggtgtattttctttcattattttatttccacattatacgtaactgtgtacttagtttttttgtatctggttctcttcattgagcattatatcctaacagagtaattttgtaattttcaaaatttttaaaattcacacatttctctcctatactacatatattctaatttactgctgttgtgaataacctgtaatgaataactttgtgtatttggcttttctttttcttttaatttctagttatttcttaagggtagtatttgtaagttgttcatattatttttctaagtggtgaattttttatgattctcgacagatgtttccaagttgctttccaaaggcatggtactaatttcagtgtcatcaacaatgtatagactttctgtttgcttgtgtttttgcctgcataaagcataaagttactggggaaaagcctatttttttttttggctaagtcaatgggcaaaaagtagtatgtgtttgattagtaatgcttttgtgtgggagaaacactgttctgatcattgtcgtcacaaccctcagaagtcatgataaaaccatctgtttctgtttaacaaaggctctgagagttattctaggtcagtggaatgatgcctttctgtacttactgcgaagaagtttattaagataaattgcgatagtttcaactttcttggagtacttttaaaagagcaagatccactcagatcatcatggaaaatcctgtcaaactctaagaaaattgtctaggaggccgaagtgggtggatcacttgaggtcaggagttcaaaaccagctaggacaacatggtgaaaccccatctctactaaaaatacaaaaattagccgggtgtggtgatgtacgcctgtaatcccagccacttgggaggctgaggcagaatagcttgaacctgggaggcagaggttgtagtgagccgagatggtgccacttcattccagcctgggtgaaagaacaagactctgtctcaaaaaaaaaaaaattgtttttgatgaagccattaatgttatagttaaaatatatttaggtatgctaggactccattgcactttcctattttttatgagttatttgtgtatttaatggggcacctagcactatgacatttcatatatgtagaatatatatatatgcttgacacacggaatgctcagtgaaaatgtattaaatatgaacgaacaaacttctgcccgcactttagggccaagagtataattttctgctgtaatgatgacagagagctatagtggagtgtgaccttttgatgtactgctggtcctgattatagtttacttgactttgaaggcttgatcaggaataaaacctccaattatatcactttttcagtggcaaacctgttttatggagtagtgatttgtcttgcaacagggctttggaaactcattaaaaccagggattttctcgcacatttcctaagagaattacaaatatgaaaagctgtggataaaaattatctgatttttgaagatttgctcatttttagaataaaacgttttcttatattttcatatcatgttttctaaatttttattctttcttgagggaaccattccaagttgtacaagtacgtttctttaaatatttgcatttgacaatgactcccttctctggttcttctaacaccttaaatgacttttttttttttgagacggagtctcgctctgtcgcccaggctggagtgtagtggtgccatctcggctcactgcaagctccacctcccgtgtttatgccattctcctgcctcagcctcccaagtagctgggactacaggtgcccgtcaccacacctggctaattttttttatatttttagtagagacggggtttcactgtgttagccaggatggtctcaatctcctgacctcgtgatccgcccccctcagcctcccaaagtgctgggattacaggtgtgagccactgcacctggctgactgttttaattactagtatgtgtccgtaaatgcctgagcaggggttttgagaactgtgccttcctcttctttgacttttaaaactgatttcttgtgcagtattatctttctgaattatgtagcaattttgctttacccaggattaggtgtgctcctctgggttgggtggttgtgtagtacatcatgtgatcagacagcaggcatggaccaggacggtccctggcaggcactgtgtggggctcaactccttccttcccttgtcttaccttactcactggagcatttgttgctttctctcctctcagcccatcaacctagagttgagtaggaaagagtgcattgaatcaagtatttaaattgctctgatggttttgtatgtgctatagaaggaattcgaagacagtttactttttgtcattttcatgggaatcaagaacctcatttaatcagtagcctggtattagttctaaatcatccacacatagatgtggggtgattttggtcatgttattttatagggcattgcccttctcctccagccaaaatatttgtaatacaaagcccatgattctgtcctctctctgtctctggtttcattgataaacttgtaatattttttataaaaactcttttaaaaattaaaaatagatcctggtatggtggctcacacatggaatcccagcactttgagaggccgtggccagaggattgcttgagcccaggagttttaggccagcctggccaacacagcgagactcttcctgggcaacatagacgctgcctctacaaaataaaaataatacttgatagaaaattcaaacagatggaagggcacaattattttttttccgagacggcatcttgctgtgttgcctaggctgcgtggcgtgatctcagctcactgcaacttctgcctcctggggtcaagcaattctcctgcctcagcctcccaagtagctgggattacaggcactcaccaccacacccagctaattttttgtgttttttagtagagatggggttttgccatgttggccagactggtcttgaactcctgacctcaggcgatccgcccacctcggcctcccaaagtgctgggattacaggtgagagccaccgcgcccagccaggcacagttatttttaagtttcttttcccatgctataggttcattttgcagatgtaaccgcttttgaagtctcgttgtgtcgtttaagaactgcttttgaggtatctctgccctacattatatcatcctacagttctgagacttgcttttttcattaacagtatagatcttggacctctttcaccatcagcacagagacataacttattttgcaattgttcagtagtgcttcgttgtgtggatgtgccaaaatttatttaagcagagcccagttgatgggcatttaagtaaaaaacatgccgtgttttgcctttttaaaacaaagctgcagtgaatatcctttgactgcctggatttgaatcttggctccagcagttgccagttcgtcgactctgagcaagttgctttatctctcatgtctgcaggtttcccctctgtaaaatgggaatattaataatatatgatgggtatgtagaataaaatagccagtgcatatgatacccagaataatgcctgggacacagtgagtgatcagtgatcattagctctgtatggctgcctgtgcctttgcacacttgagagtaagtcagtcaaataaattcctaaatgctgaattgctgggctgctggttcaaaaaatgtacaattcaaattttggtggatactccctgttgccctacacacattataccaagttattcttccactagtaattaaacttttaacctctaaaagccttttttttttcttttaatgtaaggcttgaaagcaagaacattccttcattacttcctcctacttatctttactcttggccttactacgtcatgacacatcttatgaaatactggtgtgataataagcactttgtgcagccctaccatggaagaattggtgaaaatgtaaaggttctcagtggtcttcagacttgtgtttgagtttctctcttgcaacaaggtgcctgactaagagagtaaaggttacttcctgcatgtttaatggggcttgatatttgcatatgggcaggtacatcctgcttaatgaacagtgttgggagccatgtggatgattgacatcaacttgtagtacaacaggaaaacattcctagattaatgttccttttcactgggtagggctagagggcaactgcaacgagtgaaatgctaggctgcaggtagatggcttgtcttgagctatgaataatatgtttggcagcagcatgggcagaaaagttgagatttctggatacaggacctggtgaagcaggttctgtcacagggtcagatcacctctaacacctggccatccccagtgcaaaggaaaactaggagagagagaagtgagtataagaggcagctgagggactcttgacaaagttgagaaggatctggtgtcctgggagagctcctgtcttctggaattagtgatgcatcttttgtggaggctcctgatggctcagtaaaaggagcctttcatcttgcccttcctacagggctgagaggggaggggttcttgggacaagtggcttttagcagagaacaatagaagccgtaggctgggctgtcacttgctttgctacttcttagtttgtaatcatcctctgtgtgtccctgaaagtcccctggttctctctaaactgtggggctccaactgaattcctgtctgctccccaggggtgccccgcagcagttagagcagcttgttgagaaggagccgcaggggtagggcagaggtggaccggaagccggaggaggccacttgacatggcgattggagccctcccagcctgtgctttagacctgccagattcctacccacctcaccttggagtgggacatttcttttcacagtgcccaggcttaactatgctgtccccgggtccattcccaactgttcctattcaagatgtctagacctttgttccctgccttggcattttcctttcctggtgtggagtatctctttttgaaatagctatctcagcttcaacatagcagagcggaaaacctatgtctgggcttgaggcagggggaggaaaccgtagatagatccaggaatggccaaagtaagcagagatccgtgagcctggacgtgtcatgacataacaaggatatgtgggtgggaggggcagggatgacatctttagctttctgtgaaatcatagacatgctttcattattttgtagaatcaaataattttgaagatagagatatctgagtccatcgatacttacctctttttttttttctttgggacggagttttgctcttcttgcccagactggagtgtaatggcgccatctcagctcactgcaacctccgcctcccaggttcaagcgattctcttgcttcagcttcccaagtagctgggattacaggtgtgcaccaccacatctggctgattttgtgtttttagtagagacgggatttcaccatgttgattaggctggtctcgaactcttgacctcaagtgatccacccgccttagcctcccaaagtgcttaggattacaggcatgagccactgtgcccagccgatacttagctcttattggccatagttctcttggagaatttggggaaaagtatgggcctctccacaccataagtatacatgatgtacttaccaaacacgtgcatgcaagtttaggggttcacaggccctggaggtttgtctgcacatctgcactgtggggcagctgcaccttcctatacacaaagacccagggtcgtggagagacggcacttgtgtgggtcacagagttggagacagtgtaccagaagtcattggtccgcagagccgtgtcttgcattttatactccagtacgttgcttcggtgggaagggtgacctcattttttgtttaattcgaagacctcactgggaaagaaacacatagagatgtggaaggaaaaagaaaaagctgtgggaaatcgtgaattcgtggacattgatggtgaaaggttcatttcaacccttgatgggaacatcgtgattctgtttaagaaacagcatcatgtatatgcctttctaataaaacggcgcggcaccttcccacgcaacttgcagccacgaggttaaccagagataaacgtggctttccttttccttacatcttcctgcaacacccttcacaatagcccacaccaagagagttcttagggtaaatatctgtggcgttaaatttcactttaatacagaaaggctggccttgaaggggagggaagagaggagcacgactcacttgggcctcccagaggcaggcttgaggacctctcctgcagcgtagtggatggggaggaacagcacgcggggttcaggctgaccgcagctagactcctggggggtctctagctctgtgaccagagtggctctgcctcagtagcctcccctgcataaggacacctttgcagggatatcgtaaggaatggagagactgtattgaaaaatatgccggaagtatctggtttctatggggccctcagatgatggccagcatcgtcttcaacaacatctttcattgtcatcatcattgctgccatcgttgtcctgggccaggatggttggcagtgagggggtctggcatgcccatcgtgctctgtggtgctctggtgctgtttgaaacatgcgactggttcttttagagattggctgaggagcatcaccttttgtgaaccatgctgatcaagttcatctattgtttgatgttggttgagaaaatcattgatcctaacatttcattcttacacatagccttaatgttctttttaagaaagagatagaagggctttgcccatgcaaaatgcacacgaataatggcttacccacttgcaaataatccatgtgaaaataagttgcttggaataacataaaatcatgaagaggccgggcgcagtggctcacgcctgtaatcccagcactttgggaggccaaggcgggtggatcacctgaggttgggagttccagaccagcctggccaacatggtgaaaccccgtctctactaaaaatacaaaattagccaggtgtgatggcgcatgcctgtaatcccagctactcggaggctgaggcaggagaatcgcttgaacccagtaggtggagggtgcagtgacctgagattacatccttgtactctagcctgagcaataagagtgaaactcagtctcaaaaaagaaaaaaaaaatcatgaagagtggacctttttgcaatttatatatatgttttcctatattctgcgatgcttataatcatgatgtaaactaatccttctttggctgcaatagtcaaaatatagttataggaaataatattgagaagaaaaatatattcctgagctaacaaaaagccatataggaaagaaatgaagtgtgtacagtgggctctcgctcagctttttgttttttaagaaacactccattttaaagagaaaggcccagccatttccacagatgtgtttctctctctgagctgtcagtagcatctgcggttattttctggaaaatggagaggagatgccatgaacttggatttcagagttcccctctgattatcaaattgaccctcttggtgatgaatcccaccattggttcccaaaaggtcataccttagtcactttttaattatgtgacccccctggggtgcacaaaaggagcttcatggggacttcatgggcctctccactgtctgcaacttgaagcctgatttgcaaagccatcggaagagaattccctatggggtgagcagccatagttggcaaacagctccaccaccacagccttggagagggagggcggtgcagactgacccatccaaccaagccaggagtcaacgctggggccatcagcatgcgaagcaaaggaaccaagtagcagaggaaactcagcaaccccaaagagctgctgagaagaaatcagaccctcctgaagacttctggtgcagtccactgctggtgtaaagagagattttccattttgacagatcccatggactcatcttcagcaaaccattgggcagggaatcaaaagtcatcataaagacctccgggtatttttctacatcagtcccctgcgtgctgcgagtcctgaaatggagcttggagagcagcgggtgggaggagaaggttgtcgtccctactgtttttgcttggattgtttcaccctgtccccacacgtggacagattcagccgggtgcttcaagacatcattcaacttgcatatactttgttcgtttattacacaaatatttactggttgtgatgtgatctttgagtgctccttggttcccccttcctcctcctccaagaaaagatggatgttcctctccttccttacacagctcctcctcacctcccatccaaatgccttatggcatctccagtggtgtcatctgctccacattggccaagggtcggtagggtcaggacagaggcctgttcatcacttcatctgcagcacctaccacagtgcctggaggtggaagcttaaacacttattggataagaagtttccgtagtcctcttactcaaccactagatggtcacttagtagccaaaaccaaaaccaaaaaacaacagttttttactttattggacaagcactgattgagccccttctgtttgttttttcacttcaaaattattttctttcggaaactttcaaacagaaaagttgaaagtacagagcaatgaacacttgggtattcctctgtctggatccagcaactgttaacaactcggcacacccactctgtctatctccctccctcccctgtgtgcacacacacatgtgcacagacacagcctcctcttgcgctagatcatcggaaagtaggcaccccaaccctaaatatttcagtcttaggaataagatacgccattagaaactgtggttacaggccgggcacagtggctcacgcctgtaatcccagcactttgggaggccgaggctggcagatcacagggtcaggagatcgagaccatcctggctgacacggtgaaaccccgtgtctactaaaaatacaaaaaattagccgggtgtgatggcgagcgcctgtagtcccagctacgcaggaggctgaggcaggagaatggtgtgaacccgggaggcggagcttgcagtgagccgaggtcatgccactgcactccagcctgggcgacagagcaagactgtgtctcaacaacaacaaaaaaaaaaatgtggttacagaggactacgtgctttgggagtacagagtgggaaaagttactttccaaaaaaaatggaaacaattagaaatggtttctttgagaaggtaacacgtatgctgtgccatttgcatagataccggtttacagtgtttgggtctaaaactttaacaaaagggaaaagataacagtctttcaaaaagcttactatctcctcaaaaaactcattcccctttacagtatttggaggtttgatttttatgattcctctgtggttttgtaataaccacacttattatttccttagcttctcgggctgtcattgaaaaagtgcctttaattttgcttgcatttactagtaagatttattcatgtgcagaggggccgtgtagaccagtgaggtggtgtttagtcagctgcatccgccttgctgtgcgaaatgctggtgaaagctcagtgacttggagcaacaccaaaattcaatttttgcattttaataatagcttaattttgtgattatgcttaacaattctatacatccctaaataaaagaaagtataggccattctaagcagtcagaacttcagctttttctaccatataatggagggttttgctaaatttaaaaatgtgtccttgaagctgaaaggccacctctgaggcactctggggagagtgttcgctttccaacagtcgggaagcaagcaaatggcacacaccctagaccagtgagagaaaggcacttgcaggcctgttaggcattttgttggctaaatagaggggaaatgatggaaaacaaatactgaatattggtttggggagggaatgacaacagcttgtgtgaaacggaggtgattttaaacataagccagtgggtttcagagcacaggctatggtgggaagtggtggggagggggaagcttagcaaatctgggtattggttttgcctgtttttaaaccccctttggagtctagtaaggttaaccactctggttagttcagcgttctaacaggtgactttacattggaggaagatgttcagaaggcgtggaagacacatcttcgagcagccccagcttctgatgattttgttcatctgggttgcagacccaatctgtgtcccagggactgggactggccttcattaccttattgacatgcttctcccggacacacacacacacatcacatttgcagccatctcaatttagtagaggaattacacataaccaaaacactccccaaatgtgtgctggagaacagctcggagggatgggacggcctgtcgtttcctgacgttgactgacttgagtgcaagaccccagagcctgggtgtgtgcagagggcggatagcacatgggtccctgcaggaggcctctcggccttcttccatgtgtgtgcacgtgtgtgtgtgtgtgtgtgtgtgtgcgccgtcaaatgttggagcttctggggaccaccccaggaaccctctggacaggggtgtctagcccaggcctgagtgcagcgccctccctgagggtgagggttggcttttaaaagaggatacctttggctgggcgtggtggctcacttctgtaattccagcactttcggaagccaacgtgggcagattacttgaggtcaggagtttgagaccagcctggccaacatggtgaaagcccatctctactaaaaatccaaaaattggcccgggcatggtggcagacgcctgtaatcccacctactcgggagactgaggcacgagaatcgctcgaacctgggaggcggaggttgcagtgaactgagatcacaccaccccattccagtctgggtgacagactgagactgtctcaaaaaaaaagaaagagtgacacatgaaataaggggcaagaggttctgagggagaagccttagaaaaggcagctctgttcttcctagaggagtcttagtttagcattttaccacaaagaaatgtcttttttttgaaagcagaggcccacagaagctgtgacatggctaagcttagctgtcccaggccaggatcggaactgggtgctcatctcacacctccacacccagcactagcccaaggtgggacccatgaggtgtgcttgggcacagttagggagaaagtcaggatggattggcaggggaagattcacttccgaagtattggcttagcagaggagctggctcactgggggatgagactcaccgatggcagtgtggttatttatgtataatcttcactcatcatttattccctaatcacgacatcgggcacacctgctgggttctaggtgctgagtatttgacagtggataggacagtgaaatcctgttgtaaaggggcttttcttctgtagtattggggcggatgggacccataataagtaaaccccatgatatatttaggctttgtgtccccacccaaatctcatcttgaattgtaatccccataatccctatgtatcaagggagagacatagtggaggtagttgaatcactggggcaggttcccccatgctgttcttgtgatagtgagttctcacgagatctgatggttctatataaggggctctttccccctgctgggctcttctccttcctgctgccttgtgaagaaggtgccttgcctccccttcgccttctgccatgattgtaagtttcctgaggcctccccagccatgctgaactgtgggtcggttaaactgctttagtttataaattaccctggaaagtctcccactgggaaaaataattggaacaggcagcatgactatttttagcattatttcaatatgggtttaaacttttttttaaattgaatattgtaactattaagtttaaacctaaggatatagttgctaagtatagttcttctctcactatgatttaaattatgttataaagaactggcagttctttatagcagtctgaaaatggactaatacaccccacaaaccaacaggaccgtttcagatggtgatgtgaactctaaagaagataaacaatgtgatgatggcttagaacagcagagtggaatggagatccaatgcaagatgtgcaattttaaatattctagtagccacattttgaaaagtaaagagtgagggaaactaacttaatgtaacttataaccggtatgttcataatgttaccattataatatatataaataattgagatattttgcattttctttgcattaagtcttctaaatctggtgtgtattttatacttagagcacacctcaacttggattaaccacatttcacatactcagtaggcacacttggctagtggctttggctagcacagacttagtgcttgggggcggtggtacaggtccactttagattgcatggttatctttaagaaaagtcctgttaactaagcacaaggaacagttcctaccactgatctatgttgtgttttgtttgctgctaatgtgctcatacatcaaggtaaattattattttaatccagatttcagctgattttttaacagcagttttgctgtgtgcacgctgaatgggattctccaaggacaggcaatgagaaatccttcaacattataggaggagacggtggagagagatccttatagtctttgagagaaggctttggggtttccagggcctacattttgtcagagatcttctttcctgtacaggaaagtaggtgttgcaggttccttctttttcactctttccttaattatgggaaggaattccaccaacattgatgtttaacctggaaagtctcccactagggaaaataattggcacaggcagcatgtctgtttttagcattatttcaatatgggtttaactgttttttttttttaattgaatattgtaactattaagtttaaagctaaggatatggttgctaagtatggttcttctctcacctactcagtctttgggtgggtgaaatgctacttgttgaatgaaattagaataatttccatctgagtttttcaggttcagctgcaaatgcaggagttggtttagagtcagtttatgaaggaagttttggaaaacattagagtattttgtgtgtgtgaaaattagacttgtgggaaggagtgtggtaaaaactgctagcaaacactaggcaaaatttttctaaaaatcatttgccttttccttcacgtgtaaaagtcatatatgttctttggagccaatttgaaagagaataaatcatccataatgccatatctttacagtcttttttttccttgtacctttagatgtgtatttggtaatgtagtttttacatagttttatgctgctttttacacttgtcatgtgtattttcacattttcttattttttcaagaatttagcttttaaatggctgtgtaatatttttccttgtgaatgttctgtcattcattctctctcttttttttttttttcgtgacagagtctcgctctgttgcccagactggagtacagtggcgcgatctccgctcactgcaacctctgccttctgggttcaagtgattctcctgcctcagcctccaaagtagctgagattacaggcacccgccaccatgcctcgccctgtcattaatttaatctttaattcaccctctattgttgttttttatttttcattattataagtaatgctgccatgaatacctttctacatacatatttatatgaatatctaattattgcagtaaaaactagtagaagcaatcattcagtcaaacaatcaagacttttttttttttttttttttttttttgagacagagtctgtctctgtcacccgggctggagtgtggtggcacaatcttggctcactgtaacctctgcctcccaggttcaagcgattctcctgcctcagcctcccgagtagctggggctacaggtgcctgccaccatgcccagctaatttttgtatttttggtagagacagggtttctccatgttgccaggctggtctcgaactcctgacctcaggtgatccacctccctcagcctcccaaagtgctgggattacaggcatgagccagcatgcccggccccagtgtagactttttttttttttttttttttagggcttttgatatttgttgccaagttaccctctaaaaacctagtgcaagattacattttcacccctggggtgtgagtgccttttgccccacagtctagaccatgctggatttataattttaagggaatttattaatttgttagatggtggatgtgtcattttgatgcaggactttaaggaagaaaagatatatctttaaaaacgttttctgtttttcttttttagcttgtcttttggagttcttgcctttgacttaagggcaaatgtcttactgagagatgctgggtgcctgggtcacaggtggtttgtcgttgccctttttctttttttttccaactcagctaagttcagcactagttttgtgacttattacacagaagacttgaatacatcaagggcctctagagatttgtggtaacatcaagatgtgtagtctgtaatgtgtcatggggggtgtgagccattcaaggggagttactcttaatggtaccattattcaggatacagtgctgatgcctgcatcctgatggcaccactgtcgtccaactctgtttgtgacattgttcatggcctctgcagagtcagggagctcctcaggataaggctctgtgacatcgtctaaactccaaagaagtagagccatcatatttccttccccaagggagctggcatctaccatcactgaggattttttgagtctctgtaccaggacatggacctcaactctttatttccatgattaatccctatgtcaatgtacatggcaaatgctagcatttccttcattttattgacgatagaatcaaaactcagagtgtttaggtaatttccttgaaattacacagccaggaatggccaaggctgggaattgaatggactccagaacccatggtcgaagtccaagctcaatatctctgagacctggaaggaaatgaaacagactaaaatcagagtaacgcttaaaaccatgaagattccagcccacagattctatctgccacatgcagacacgatttatacccctagagggaaactgaagaaacaaggtggtggtcatacaataatagactcaaaacccaaccacacttttgaagtgaatagtggctcatgatggctttaaacatcttaggagaaaaatcaaagttggtgatgggctaatttggaagattagctgaaaaagttaagtggcaaagaactaagtgatagttggagtgaggaaggcattttggtgtggagagagtaagattggggaaggaaagctccctgggtaactgtaggattagaagctgtgaggagtgtggtttaatcagacaatttggaagcaagacagagagggaacagtccccatttggagagtgttagtgttcagggtaatcagaaaggaagagtcggaagcatatgtaattaatgaacgagaaaggcagatggatgatggggaggtgggtggcgtcgcgctactcatatgttcttttgataagtaaaattatagcataatttctcactcattggaaacaaggttatgcaattaggatcctgctgctgctaaaagcttccagagattttagtgcactgggcagacagagtgatgatgtttactttaaaaatcgaacttctcgtttgagatacttaattttatttaatgctcgatttttgtatttactggttctgcattttctcatgtagattaagatccaatttagagaagaaatatatgggcagtttggctgtagaaagcacagaggaatgatgctgtggatattgatgcaccatgtggtagacagcattttcttttcttttcttttcttttttttttttttttgagacagggccttgctctgtcttccgggctggagtacagtggtgcgatcgcggctcgctgtaccctcaacctcctgggctcagttgatcctcccatctcagccttccaagtagtgggacaccatgcccggctaatttttgtatttttttgtagaagatgggatttcgccccattgtctggtcttgaactcctgagctcaagtgatccgcccacattggcttctcagagtgctgggattacctggctgacagcatttgttttaaagcagtaaatgaaaatttgggtattccttttaagtttttcaaaatttcaatctgcagtttttaatctatacaaaaaactgtggtaaaagacgcctaacataaaaattacaatcttaaccacttgcaagcctacagtttggtagtgttaagtagattcaccttttgaaacagacctccagaactttttcatcttgcaaaactgaaactgtttgcctatcaaacaacagctcttggtttcctcttcctcctaggctttggcagttactattctactttgtttctatgaatttgactgctttaactaactcataaatggactcatacagtatttgtctttttgtgattcgcttgtttcacttagcgtactatcctccaggctcacccacattgtagcatgtgacaggcttcctttccttttcagggctgaataatataacattatatatatggatatgtacattgaatatcccttatctgaaatgcttgggatcagaaatggttcagattggggatttttttagattttggaatatttgcataattcttccaggttgagcatccctaatccagaaatctgaaatgctctaatgagcatttccttgagcatcatgttggtacttaaaaagtttcgaattttggagcatttcagatttcagatttttgtgttagggatcttcaacatcattctatttttttaatctgtcaatgaataaaattacagttttaaccacttgtacacatacggtttggtagtagtgttaagtatattcacctttttttgttgttgtttgagatggagtctagctctgtcgcccaggctggagtgcagtggcacagtctcggctcactgcaacctccacctcatgggttcaggcaattctcgtgccttagccacctgagtagctgggactacaggtgcgtgccaccacgctcagctaatttttgcatttttagtagagatgcggttttgccatgttggccaggctggtctcaaactcctgacctcaagtgatccccccgccttggcctccccaagtgctgggattacaggtatgagcaaccatgcctgggttaactatagtcaccttttgaaacagacctccagaacttttcgtcttgcaaaactgaaactgtctgcctatcaaacaacaactcttcgttgcttccacctcttggctactcttgagtagtgtggctatgaacacgggtgtacaaatatttctgagaccctgctttcaattctttaggatagatagccagaattgagattgctggattacatgatggttctatttaattttttgaggggcttctgtacaattttccattgtggttacaaccattttacagtctaagcaacagtgcacaaaggttccaatttctctgcatcattgccaacaccttttagaaacagtagccatcctaatgggcatgaagactatctatagtttattatgtcaagcttttcttcatggttataaacgaatattgtgatgagtgatttatctatgtttgctgctttactccccaggggaggatgagtataccatatatgtccatattgatacctatctcagaatactggttgtacaaaactattccaggcattgttcttctttaagtatttggggtgtttctttttgcttataatttagtacaaatgttctcagttcagttaataatgagtcctactgtgtggcagttgagaacatgaagataaccagaacacagttcccgccctcaagggactgatgagaagtagccacgttttgtaggaacgggcaaatgaagtggcaaaggaaggtggccatgggttgccataggagcgcaggtgagggatgaggaaaggaagcactaaaccaggtcagcttgtgacgtgggataaagaaggcttcttgcaggtaaagccagagctgaatttggaagatggtaggagttcacctgctaacctgggaggtgtgagtggagtgcctgcggctggacccactttgagcaattggaaagcctgtataggaaaccataggtgacatgatgccaagtggacatgacattcagggagatgataggcagaaggtgaggccaaagaagttggctggatgtatgtcagagaacgtggtttttatgcaatcattgatggaaagctcatgacgcattcagtgatgtggacggctttgtgctctctgcagaccactctgagggcaatgtggaggtggaggcagagagattaggtaagaggtttttgtgaaagttcaagtgagataaggaatgaactagggcagtggtagtaagaatgaggagaagggagaaaacctgccaaatacttaaaaaaattagcagccatatgccggttaagtgtatgagtggtgagacagagggaacattgaagataacccacagatttctggcagtggttccgtgatctgaaattaggaatataagaatagacactgagggtggacaggatcaattcccttttggacattttgggtttgatgtgtctgtagaagacacaaatggtgatgtccagttcaccttgggtttgtgagtcaaatttgacagattcagatagagacacactcttggttcttattagatgtatgcagtagttaaaactatgaaagcagatccatcccctatgttggaggggcacaaagaaaaggagcagcccaccaaggagctggagaatgagaatcggggtggaccaagagggagtcgtgtctcaggggctggggaaagtagaaaggttccagaatgagtgagtggtcaggaacttcagatgtagcaaaagaggtcttagaatgtaaagatggagtcacttggcagtgtcaagatacaaagactgaataagtttggcagcgtggagataccaggccgtgtgaagatccttaggacctttgtccaggcggttttaggagcttggtggttgtgggaaactaatttcaggtaaatgtttataatggcagtagagtgactatggagtactccttcaggaaacttagaaggaaagagagaaaagtgaaaaagaggccaagaaatttttttttttttttttttttaaagaatatgagagacttgagcatgttacagggcaagggaagaggttgttgataattaaagtagctgacattttggagggcttgctccatatcacctacatccaacagctgtatatcaaagagctcatcaaatccatccaacaagtctgaggtgttgggacaattactgttcccagtgttatgaatgagaaactgaggtacaaggatgtcaagtggctctgggtgacaccagcaataagagagcccagtttctcataacctgtgtagatgtcaccatttaccagagcactgagatgtttgctggttttgagggagaagttgaagatttagggtaaagaaggaataattcatagaaccaagttctagaagacactggaagagatgggctgaaagctttgtgaaatttgtttttttaaatgaagatgaaaagtttaatcataagggaaaaatagggacagtaaacagagttggatagagaaagctcctaaatattggagcctgtcctggctctgcctcctgcaagaacagtggttttggtttcttttctgcacaaggtggtccttttagtcacatttattgattgattggtttctttattatcacggtttgagctgtcattgagtatgtgacattctgttattttaacagtgttatattaagaatctactctatgtttgggttattttcagtccagtgacttaaatgatagcatgccctccattcttggtgacttgtgttgagaaatcttatgctggggacatattgaaattgttgcaatgtggtttaatattacatgttttaaaagctaagaagctcctattagtctctgaaatatacctggtttccaatttagtctacaaaggagatatcattcctgaccctgatttagtgggagagacagagatgcctatatattggatgatgtattattccatacacacctacatacacagctctgtaatgtttaggaggcttcaacaatgggcagatagaaacctgcagctcctattgcattatagctcctaaataaggtgttagcatgattatttatgaatttaccctgtgagctataattcaaatccttggccaatcaaagggaaaaataaatcactgggagtagtgttttacttaaaacccattaaagcaatttaagtgaaagtttttttcaggtatgaatacctagctccctgcaggagggcaaatgttgatgtagggatatctttattaatagtcttggtgaaactgaaggagaaggcatacaatacagtctttcacagaactcagcagtagccataaatccatttatgaacagttcaagtaatagagctttgaagcataacattagttttcaataatgatgttattcttttaaaaaatcagaggtttaaatgtaatgcatggggaaatggggcataataaatttgaataagtaagcattacttttcagtggatccagcagattccctttttattttatttattgttcaggttgttgaattttgtttattcaaatagtaaatgagacatagtccagggaagagccctttgcttatgctatatgatttaaggccagctgccgtttttcctgagctacatacgcttcatcatgttggaggaatcaacttcaaaagtcagctggctgttctgcagacaagcaccagacttgttattcaccctgaatcctcagccttagctccccaatctctgttgcacagaaaactacaattcctgggtgcctggaaagagagggacaaatattaatttgcatgacagtatcctgtgcaggacctcgtgctaggagaagcccaggaaatgtttgttggtagttttcactttgtcttgctagaaaagcctctacaggaaatctcctctgcttctaggaacgtcaaatttcaaataatcctggccaagtagctggttcctattcttgactccttcatgggggcggcggaggggaaagcttcctatgataatacattgcagcattacgctgcccaaagtgccaagggcggttgggtactattcttagtgtttatgtctttagttcttgttcttttacttacttatttttggcagattactgtttacaagcctcaggaagttagcagcaagcttgtcccttagtccttagcaataacgtttgagaattgctggaacctgtttgtcttgttagcaactacccaaatacgaagaagcaaggctgcaaggcaagcaccaaacttgttattcaccctgaatcttctgccttggctcctcagtctctgttccacacactcccatgctggctgctggaaaggatggtaggcctttttttttttttttttttttttttttgagacagcgtttcactctagtgcaggctggagtgcagtggcacgatctcggctcactgcaacctctgtctcctgggttcaagcatttctcctgcctcagcctcctgagtagctgagattacaggcgcacgccaccacgcccggctaatttttgtgtttttagtagagacggggtttcaccatgttggccaggctgatctcaaactcctgacctcaagtgatccactcacctcggcctcccaaagtgctgggattacaggtgtgagccactgcgcccggccaagagaggggtaggcctttttgatgggatggaaactgctcttcctgggatttcagcccgcccctatctctcccatcaggagagaaggcagagcacagtgattgtccatgggctggtctctgttcacttccccaaggtgccgacactgcgtgcactccacacgtgaggcaggtgtgggaatgaagctgcctgaaggccgtggggatttcacagctggtgaacctgctgtccctgaagtgccattacttaaacccagagttttctgctcacttctcattttattgaaaatggtgcattggcaaagtgatgttgaactggaactgacaaccagcattgtccctctgctttcctcagactaatccacgggctgtccactcccctgtgatgctctctggatcgggtccagcccttgctttccttggaaaacactacctatatttagtggtaccactagatcttctagcatccgttttctgttgctgcatattcattaataatagggagaaaaaaaaaaccaacccttgtgtaattgctatttgaatttcacagatagagtagacatttaaagatttagttggctttaaaatgtaaatttagaagttcctggtaggcaaagcatgtttctctaagggtttataatccaatcattcaatccctattcctttacacgtaaaattaatcctttccaataggtacaaatgcctgaatggagaagatggaaggttcttggcagatggctatctgtgctcttcattggcaattttttttttaacttgaaaaagtcaagcattttggtaggagaatatgctttgctggactctgccaagtttcttgtggctgtgttcctattagtgggcttcaggggcttcctgtggacaattattatggttggtgtggaggaaaaatggaatacattattttcatcttttcattaaaaaatgtggcttccttcccttttctccagccagctgtcagatttgaatgcctgccctagtttgctctgtcatcatcgagttagtgggttgagtgatgggagctggcagaagcccattagaatgattgccagtttccaaacacaccccgaatcccttgctacagatgtctaggaagacgggataacagaaatttgcctctgggtttcagtacattgatttcttgctcattttaattacaggtctcccattaaagaacggggtgggggagggaaagcagctttgaattaaaaatgtgacttatttatgggtttagttgctttactatgaagacttgctctaaaaagaaagtttcattggatgctcttaaagttctttataaaaagatccccattgtacagatgctgacaacattccatgaacaaaaggcttatctggatcacctaaaggtctgtctggaatccaaaataaaactggtgcccaggtggctaattatcactttctgtatcatgcctggaaaatacacagcctcctttgccaagagtctatggcagggcagaaaacgctgcccaggcagcttcatgtagcattgtagcttttccaggttttttttttttttttttttttttaaatgtcatagaaaagataccggtggatatgaatcctttgtgctgaagttggatggcagttagaacttaaaatttaaagaatgcattcgatcagttgggctaatccgtttgggtggttggagcctgataccaggtaggtaaaattacacagccatctactttcattcttttccacccatttgccatgccctgcactgtctgccaggtgagagagggatgtcagcttagtgcagagttttaccacacctggagaaaagagctcctgtctgcttctaagggactgcgaattgctggcaacttcttgatctgtagaggacacttcctttccaggaaatctaattttgagaaaacgattgcacttctaaagaggtctttcccgtgtgatctctagacactcttcgttgctttaaaatgaaagcctgggttttaatatttttacatcattgcatagattcagagcaactaatattttgcttgttcagtggacaccttgttgaagtatgagtaaatttgtgaattgtagtgtttagccaacctttttttttttcccattggttttatccgtcttaaaaaggtttggatctgtgccccacccaaatctcatgtggaactgtgatccgcagtgttggaggtggggcctggtgggaggtgatcagatcatgggggcggatcctttgtggatggtttagcaccatcaccttgggctgttactgtgatagtgagttctcggggatctggtggtttaaaagtgtgtagaatcttcccctgacacttgtgcctgcaagaaagcttgctccggctttgctttctgccatgattgtaagttttctgaggcctccccagaagccaagcggaagccactgtgcttcctggacagcctgcagtaccgtgagccagttaaacctcttttctttataaattacctagtcacaggtatttctttacagcagtgtgaaaatggactaatgcaccatctatgcattatttatttggacctaaatatatcccaggaattgtgctagactgaaaatatagtttgtatatgcacatttgaagttcatgtgattctgctactctgaaaaatgttttgcattttttgtttaaaaaaaaaaagtagatttccttttctttacagttaaattagcatattagtttaaaaaagtgttgtattttatggttcattaacagaattttacgattttctaacttgccaaggattatggtgtttattcttgaacattgcaagccccattgaaagtttggatgtaacataggtatagatttttatgtgtgtttcttagaaataacagataagcagtttaaaatcattgcttccataaaagctgaaattcgtctttttgaaataggttgggtaaggatttgagcatttatgtaatttgttgttggaaccacccatcctccatggaggttatgctcaattacgtattataaaaattggcattgacactaattcactttctgtatctcttttggatagatggatgatatacagcataagaaagatttactggaaaagatgctgtaatcaaaataggttgtccaaggcaactataggttgatagcgtgttatttgcagataaactgaaattttgaaagaaagaatatttggaaggaaaagaatttcaatccgattatccagtgtttttagaccttctggctatgagattgaattgactatatttcattgactgttaattaattagtacctttgtaatggtataatttagagaactgcattttagggcattactttagtctcaaggttgtcaaatattgtaacttgagctttgaaaactagtttgtaaaaatgagggaatacatttaatccatgtcaactaatttgaatcaatgacataaaatacagcttgggcattaaagcaccgtgtatatgtttgcgtgtgcttgtctaactgggactgtctatgtcaatcttctgttaccttatgcgttgtttggtttatctagctttttaaaaaattggttatagtcttacttcatgcatttttagcacaaatcttcatttcattttaccttcaccagtaataagagcagaaaaagaggtcagcaacaaataatttgctgctcattagttgagttgatgtgtgggaagtatagcacttttgattgaaatggtggttgtcggccgggcgcggtggcttgcacctgtaatcccaacactttgggaggccgaggtgggcggatcacaaggctaggagttcaagaccagcctggccaacacgatgaaaccctgtctctactaaaaatacaaaaattagccgggcgtggtggtgtgcgcctgtaatcccagctacttaggaggctgaggcaggagaatcgcttgaacccgggaggcggaggttgcagtgagctgagatcacgtcatcgcactccctccccagtctcaaaaaaaaaaaaaaaaaaaaaagaagaagaataaatagtggttgtcagttatcagaaaaccttaactttttggtaagtttttgagttacctcttgtaagtaaaggcttgagggagtttaggaagcactgtgacgtccactcatgaaagacagaatataccagggctgggatgggatggaggcagggggtgaataagacttaggggttcgttctccctttctcctcaggttcacttgttgaaagtcttggatgcttctgtgaggccttagggggtaccatgtctaacttgtgccttctctatttttgcatacaaggcaggtgacacctccttgtcttggactcctgtggaccatgtctgttccattgatgaattagcatttatgatagattatttttctagggatggaaaaacttaggaaagccaatgcctgttgcctgcattagtatacctgatagctctgtacaatatatgctgtcactctctcagatggattggaagtattagaaactatcaacctctcaaaattctgtatttgaaaatagtcttgtattttagatagataaaatcagaagtcttcaatattctgagagctccacatagaaatcagactcagggctgggcgcggtggctcacgcctgtaatcccagcactttgggaggccgaggtgggcggatcacaaggtcaggagatcgagaccatcctggttaacacggtgaaaccccgtctccactaaaaagtacaaaaaaattagccagacgtggtggcaggcgcctgtgtcccagctgagacaggagaatgtcatgaacctgggaggtggagcttgcagtgagccgagatcacgccactgcactccagcctgggcgacagagtgagactccgtctcaaagaataaataaataaataaaagagaagaaatcagactcagttagtagatcgtgctggtctgtcatcatctactttgttcactcgttcgtttgtgtgttcattcctttgttcaataaacaagtaccagctgttggcctcctagtgccaggtgctatgccaggcttggagtgaaggtgaggactggttcaatatctccccagtccctttcactaaactttatagcaaatatattaatggatttctaccttgggaatctctctttaattttataggtgataccaacagagattttttttttttgattaatgatttttttgtttgtgttttcattatttggggatgctttttcctatttatatgaggaatatttgtacatgatgaatactgtgaacactgcaaaaagatttcccatgaatgaactcacaaatggaaactcagacgtggctggtctgtgttgcttgtcactgaaaactggactaagtcattatagcttttccttgtttgagggatcttttgcagttgctgaaactgctaaataaacacttcaatataagaaaattacaccttagcttaaaaaatattgttatttttggtttctgagagcagttatataaatttccttccaattcattgacattgttaggtagttgaactttttgtttgtttgtttgtttgagacagagtctcactctgttactcaggctggagtgtggtggcgcgatctcggctcactgcaacctccacctcccaggttcaagcgattctcctgcctcagcctcccgagtagctgggactacaggcatataccaccacgcctggctaatttttgtatttttagtagagacagggttttaccatgttggccagactggtctcaaactcctgacctcaggcgatccgcccaccttggcctcccaaagtgctgggattacaggcgtgagccaccttgcccagccaggtagttgaacttttgaacttaaccagtaaattactttttcatgtgtgcgctctactctggacaggagtttgcttttgctttgccttagagatgcccttacccacccacagagcctgagtgagctgatctgtgcatagacttagtattttccatgtttgataattgtatatattctctgttaattctgtttttgttttgtttgttttgttttggggacagggtcttgccctgtcgcccaggctgaagtgcagtggtgcagtcatggctcactgcagcctcaacctcctgggctcaagcgatcctcctaccttagcctcctaagtagttgagagtatagttgtgcccctgtagcaccaacatctggcttttttttttttttttaagatagattctttctatgttatccaggctggtcttgaattcctggggtcaaaggatcctgccaaagtgctgggattacaggcatgagccactgcgcgcagccatgcttgcaaattcttaagtctttaaaaacagcagtctttggtcttttagacacacttagatgttttgagattatctgtgtacttattgttttgttaaaaaaacaaaaaaccatgaaaacccatcctgaagttttagtttgcctgccctctgggacagctattctcaaggcatggtctgtggactgccgggagtctacaagaccagagggtctttaaggccaaaccacttttcatggtagtacttagatgcttttgttgttttcactgttgacagttgcccgaatggtgcaaaagcagaggtggacgaaactgcttgtgtcttggtgtgagtcaaggcagtggcacagccactagcggccgtcctgatcttcccctcccaccaagtgcagtaataaaggaaaagagtcagtttcacttgagagtggccttgatgaagcagtattaatgtcattaaaccctgactgtgctgcagggattcttgtctgagcaatgggccgcctactttctggtaatttttgagaatattaaaaaaaccttactttttattactttttaaaaatattctttgtaataaaatgagaagtatggataaagtgcctctggacactgagagatcattatttttcaggaaaaaaaatcttttttttttttttttgagtaatgaatggaactagccactattttcatggaacatcacttttacttagtttaattaattaatttacttaagactgggtcttgttccatcacccaggctggagtgcagtggcacgatcactgctcactgcagccttgacttcctgagctcaggtgatcctcccacctcagcctcccaaggcacacaccaccacatccagttgatttttgtatttttgggagagacagtgtttctccatattggccaggctggtttcgaactcctgagctcaagtcgtccaccaggcttggccttctgaagtgctgggattacaagcgtgagccactgcacctggcctatttttaaaatttctatttatttatttacttttgcacttttacttaaaagagcgactgacaaatcagtttttcagacttgggcatttgtcagacgttttctttaaaatgaataaagttaaggtgtcacttcaagggaaataaccctgagtatttgtcctgagccccaggtttgtgaacatctgcccttggaaaatgggagagtccacactaggagctgcagggacccatttgccccacaaacttctgcaggggtttatgtctgagctatgtgccacctgctttctggtgtccttcctttgtgaatttcccaagcgcttttgacttactttagtagcgagatggctgtgttctgggtttgggttagtagtttcatgaagatacaccacccttcctcttcctctgatctgtaagagataggaaaaaaccaaagtgtttttcctattctaatccagatcacttcctccatggtctctaaaacgtgaggatttctccacaccagcagccaatccgttccccagcagataccagccattagagatgggaagaaccgaggcgttcttcctactctgatgcaccactcaacacaacacttcagataccagatatgtggagattctgcaccccccacaacacacacaccaagcaattctccagcagacaccagctgtgtagttcagttcagttctgacgctgcccacctggcagtagtgtcagatcccacaagttaagggctcagtcccaagagactactgcttctctcctcagatgccaacgtaaatcgccagattgtgacctgtgctcctgactgactgtctctaactttggcttcccatcaccccttctcaggctcagttcatctactagggcagctcacagaacttaggcaaatacttatatttgctgatttattataaaggatatttcaagggatacagatgaacagccagaaggaagagatgcacagtagggcatgtaggcaggggggtggagtatccatgccctttccagatgtgccagcctcctggcacctcagcaaccaggagcttgtctgttatgtagacatgattgattacatcattgaccattggtgatcaattcaacccgcagcctctctcccttccccagaggtcagagggtggggttgagagtttcagcctctaatcagatgattttcctggcaaccagccacctacgcatcaggagactattgaggagcccaccaagtgtcgcctcattagaacaaaagaagctcccattacccaacagattccaaaagattttgcagctctgtgtcagacactccggtctctcaggaaattacagagctcttatgagctctgtgttaggaactggggtcaaagattaagtatcagggctgggtgtggtggttcacgtcagtaatcccagcattttgggaggccaaggcaggcagatcactagaggtcaggagttcgaggtcagccttgccaacatggcaataccccgtctctactaaaaatacaaaaattagctgagcatggtggcaggcacctgtaatctcagctactggggaggctgaggcaggagaatcgcttgaaccaggaggcagaggttgcagtgagccaggattgcaccactgctctccagtctgggtgacagagtgagactgcatctcaaaaaaaaaaaaaaaagattaaatatgagaacgaaagatgcatataaatagatagggacgtaatttccctatctatttataagggtttcaggagctctacatcaggaactaaatgtataccagtgatatggtttggatctgcatccccacccacatctcataggaattgtgatccccagtgttggaggtggggtttggtgagaggtgattagatcatgggggtggatccttcaggaatggtttagccccatcaccttggtgctgtgagtgagttctcacgagatctggtcgtttaaaagtgtgtagcacctccctgctccctctttcttcctcctgcttctgccatggaaaatgcctccctcccgctttgccttctgccatgattgtaagttccctgaggcctccccagaaacgtgtcaccatgcttcctgtacggcctgtggaactgtgaagcaattaaacctcttttctgtataaattacccagtctcaggtatttccttatagcaatgagagaacagatgaatacaaccagaggccaaatacatatttcttattacacagcatcatactttgcttcacatgtgtataaccaaggatgtttttgcttgtcttatatggtatgaccagcttggcagtggatctaaccttttaggacttttgctactaactctgcttggtttctgtttgtgtgtgacaatgtgattcaagcagatgttatagtctggtgaacgccaggtgtactgtactggagaaaatagaaaaagtcaggggctggtttgatatcttgtggtcttcctgcatgtactatatgccaggagacttacttcatagtaagacatactatgaagccactagaaattgtttttaaagactagtttagtgacatgatgttaagaagagtggcaaggtacaaatgcctataaatagaccagaatgaaaatatacttaaatgtacctggagaaaaaggccagaaggaagtgcgccaacatgataacgtttatctctcggtgctcatagaatgagtagttttttttttctttatactcttccacattttccaaattttcacaaatgggcttggattacttttataatcagtaatttaaataaaccttttaaaagcacagcttgtctatatttcatagtaaagtctagataatctctgctgactttaaattcagcagtattatatacttaactatgattgagctaaaagatgctgtcattgaatttttaattttgatacgatgtccatttagaaaataagttagaacctcctttggactttttccctcagtgaacagcttatatcaaattagcatgaggttgattctgaattggctcacacttgaagtgaatgtcctttgtaattttcaaagtgatcagtgagggattagaagcttgctgtaaagtggcagtttacctacacttgctcagctgtaaattattaacttttggcccaaaggtagccctggaagtcctgagctattcattcaggagcacggtaggcagaggccaatgaccttaaaaccaaacggccagatttctaagcgcagtcttaaagcattcttctttgtttccacaaagatcaaagatatccttaaatcgatgttagagaaagcgttcaaagaagtgttcagcttcaaagaaaaaaaagtggtaagctttctagccctttccagctcgaagtgccctggggtctgttggtttctgggtaggttgggcgatagggactttgcctggttgccttttttgcgtctgcttcctcatctgtgaaatggggataacaacagtgcctgctcaaacttgttgggtggactgaatgaatccgtccatataaaatgcctggcacataagcactcatcagctgttgttataattaaggtcagtccttgaaaggcttaaagaaacctgggcaggaggctgctgtaagtgacaagccacccacactgtcaggctgcatgcattcccattcgttaggtgcctctttgggaattctggatactgactggcacacagtgggcattctgtaaatggtggttaaatggatgaatgaaccggtaagaccccctccctcactatgggtttctcttactcatctgtaactaattccaaagtctaccatcatgaaagagcctgcactgttgtcacctgcctctactgaggtggctgatagactagctgctgctggtgtctatcacacaggctacaggtcctggacccctgcaggatgggcaaccaccatcctgactggctgagagtggacacccaggaaaagatgggtgtgggccatgcagaaagctgcagcggaatggcattagtgcaactccacgtgtgtgcccgacgtgctggaacagggagagggaagcagaggcagcgtagtgtcagaagcgtacacaggcagaggtggctaggggagtggggagcatccatgtggccggcagctggggactgacaggcacagctggatcctctcccaccgtgtagccacctgcccaaactccactaagccttttcaaggactgaccttaattataacagctgatgaagcttattgtgtgctgggcattttacatagatgagttcagtcaatccacccaatagtctcaagcgggtgctgttgttatccctagtttagagatatcaaagaagttgaacaagccccatcacaggaaaaaggaggtgctgggatttgatccctggcagcctgactctgaagcctgtgtaaccttgtgcttcctcctcctgctggaaacatcctgttcctgtgtgtggactgcacaccccgggtgccagaaacctcactgtggattgtctgtctgagatctaccctgtccatgtgtcacagtattggaaaaggttctggaactctggcctttgtctcaaaaaaagttgggggtgggtgggcggtctcgctctgtcacctaggctggagtgcaatggcgcgatctcggctcactgcaacctccgcctcctgggttcaagtgattctcctgcctcagtctcctgagcagctgggactacaggtgccccctaccacgcccagctaatttttgtatttttggtagagatgggggttttgccatgttggccaggctggtctcaaactcctgagctcaagtgatccatttgcctcggcctcccaaagtgctggaattacaggtgtgagccaccgtgcccagcctggccttttttttttttaatacaataaaaagattaattgaaaattattaaatccatagcatagtttactgcagtttaccgtattgttcaatttaggtataattacagatacaggtgccctaataccacaaaactgtctggctagtgtgaactttggtccctaaagatctggtgaaatccctagccaggtgcagcagaggaatttgtctttgcctggattatcatctttggttcttactgtcctgtgttgcctctgtggcccatccattcctaggctgcaaggatggcttcaggccatttctgcttgtagagacttgcattctctctctggaattgctctaagcttagattttcagttgagcaaacactcatcacatgtacctgcagagagctcctgctgtctcttttctcagttgcataccaccccaggtaaggagggtccctctgcctccagtgtcactgcaaagcgacagctacctgttgcccattgcccaggctcacgtttggtcttttgtttggctgcctctcaggtagtggaaggtgaaacacaggacttttcctgatagagatagttattcctctgttgaaatccaatttaaatatcgttctcttcatggcaaaaaagagtcctagagttgctcaggccattctttggttcacagtccccaggatgcatgcaactgggatttttcttaaactacttacctcttttatttctatggtaactcccatgctaggaatacaaaacacaaatctgcacagcaatgttgcacactctctgttttattttccccaaattagccatgtttgagcgtggacctcttcatgggcagtgaggatcactcagcacacatttctgtaaactttttggtgcgcgtgggttttactgtcttctgttgaagctgtgtcccccatttggaaggacgtgcaggtgtgaaggaaggacagttcttgctgaaaaagatgggaatggcttgcagatgtctgtggattaagcagatctaaaagctatgagaaaactgcctacttgtgtgtgtgcgcgtatgtgtatagtaaatgtatatatgcatatattttatattgacattctgtagatatgtttgaatacagaaacttgtttttactccgactactgaatccagaagtaccaaataatatacagtaaacagtaaaaccaagatttaaggttgtgtcaaaaaggtacagtgattcagtcatatccatttgtcatttgttttagccttttttttttttttgagatggagtcttgctctgtcaccaggctggagtgcagtggcgcgatctcagctcactgcaacctctgcctcccgggctcaagcaattctcctgcctcagcctcctaagtagctgggacttacaggtgcatgtcaccacgcctggctaatttttgtatttttagtagagacggggtttcaccatattggccagggtggcctcgatctcctgacctcaagtgatcttccagccccagcctcctaaagtgcgggattataggcacgagccactgctcccagccggtttcagcgtttttctttgtttgtttgttttttaagagggagtctcactctgttgcccaggctggagtgcagtggcgcgatctcggctcactgcaagctccgccttctgtgttcacgccattctcctacctcagcctcctgtgtagctgggactacaggcgcccaccatcacgcccggctaatttttttttttttttgtatttttagtagagaaggggtttcaccgtgttagccagtatggtcttgatctcctgacctcgtgatcgcccacctcagcctcccaaagtgctgggattacaggcttgagccactgcacctggcctcagcattttttgagtgtttttctttctgcagttgatcagttggatcctccatatcttgcgtatatacatgggctcaattattatgttaggataatcaaataagaatactagttcaatgattagcactgagtggttgttaggcagtcatgtgctcaacactgatgtcacctctttctgtaagcatactgagtagagacattttttaggtttaaattgacttaaatgaaagtgaataaaaaggccttttcaaaagaatgggtttgaaaaacctcagtaccctttaatacatgtacatttctttcctttcttcatttaatataacatgtgtctgttgtaactgtgtttcttaaatgttattttaaggttatatgttctttaattatggtcaaatataatttggtcaccaaaaacgaaataatagtttaaaacaagtagctgttactaagggtgctaaaaatactcattttataattaatttttaaagttttcttagtatattataaattgtgccctggtcaagtacaaatgtacacatcaaaatgcccatattgtatctgtctttagtcacttgatgtgaattatatgtgaattttttttggttcaaagttttactaaccagaattaaacactccgcatgagaaaaacggcacaacacaatcttgaggtcccttctgaatcatcagattatattatgcttcatatgttaaagaaaaaagaaacctgcctactttattaaacttacaagtttaatagagtcttggagattgatgtcttggggcatgattgggaaagtctccaaggcataggtccatccatgtatttcttcatttattgacatcttgtgcccagcacttactgagccacagcaatgtgtagtaaacataatgcgtcctcagtcagtgtttgttgaaggggtaaacaaaccccattctgggttgtgttcttttttttttttttttttttttaaatatgagacggagtcttgctctgtcaccaggctggaatacagtggcgcaatctcggctcactgcagcctccgcctcctgagttcaagcgattcccctgcctcagcctcccaagtagctgggactgcagaagtatgccaccacgcccggctaattttgtatttttagtagagacggagtttcaccatgttggccaggatggtcttgatctcctgacctggtgatccacctgccttggcctcccaaagtgctaggatgacaggcgtgaaccaccacacctggccaggggacatgttcttaaagtttatgaagcatcagctttgtctaagctttagtcaagagtcagaactaatacagatggtcccaacttagcatggtttggcttaagatttttcaacttcatgacggtgtaaaagtgatagaaattcagtagaaattgtacttcaagtacctgtacgaccattctgtttttcatttttcagcacagcattcagtaaatacacaagatacttaacattttattatcaaataggctttgcatgagatgattttacccaactgtaggctcatgtaagtgttctgtggacggttaaggtaggctcggctacgatatggtgttaggtgtattaaatgcacgacaatactttcaatatatggtggtttttcgggatgtaacccattctaggttgaggagcatggagcatttgtagtcagagggaagaaaagacatttggaggattttgactggcgatttttatcattttgagaccagttttggactaagaagacagtcaaatcaatgttctcttttggcctgaagttttggaattcagtgatgtcgttgtcccctgcattcccctcctttgtggaatttcaaaacccccttcacataatgagagaaattaaccctgaagaaagaaaggactggaatttctactagcttgttgataatgcattattgttatgctgtcatgggaaacctgtcttcctaggttctaaattggtggatgactgtctggtgacggagtccaagcgtcattgcacaatgaagatgaaaaacgcatgttggatggctactccagtgaagttgaaaaatgcttgcctgataaaatgcttgcctgatggctactccagttgggcacatgcatactgccttctgcttttgctcaggaggaagataagtgaaactaaaggattttggttgagtaatttagagagagagtaaaaagattttggtgtttgtcatgggagttcacaggctcttctaatggaacagagaactgctttaggggccagtttcaggtttttgcctttctggaaggaaggggcagtcccttttccctttgaccacttacctctattgtcagtttgtgtaattatgtcagaactcagccacagcctctgttttttttttttttttttttatagctctatcaagtgattttcagctttatagggaaagatagctctgaaattttctttcttctttcttctcttctcttctcttctcttttctttctttttttgagacagagtcttactctattattcaggctggagtatagtggcaccatctcagctcactgcagcctccatctcccaggttcaagcaattctcctgcctcagcctcccaggtagctgggattacaggcacccgccaccaggcctggctaattttttttttttttttttcttttagtggagactgggtttcatcatgttggccaggcttgtctccaactcctggcctcaagtgatccacccgccttggcctcccaaagtgttgggattacaggtgtgaaccaccatgcctggccttgaaatttctttttctctactttttcctttttacccactgtttagtttgctagggctgctgtgacagagtaccacagactgggtagcttaaacagcagaagtttattttttcacaattctggtggctagatgtttaagatcaaggtgtcagcagggggttggttttgtctggagcttctctccttgcctcgtcgatgccatctcctccttgtatctttacgtggttttctctctgtccttgtttgtcataatctcttctcataaagatcccagtcctaccagattagggcccaccttaatgacctcatataaccctcttgcctttctaaaaggtcctatttccaaataaggtcacattctgagatactggggattgggactttaacatgagtgatttgaggggagactaacatgaatttttggggggtgaggttcagctcataacacccacttcactttttcgtagtacattggcagttctgtttcaagagctcagttaataattatttgatgtgtcatggattagaacatgaaacaggaattttgttttattcataaaactgtatccctagcacctagagcatagcgtaagccctcaataaatataggttggatattattggatgaatacatgtcatatctggaagaaggataaaggaatgccctgaagacatgttagtttcaaaatgttctaaaggcccagaagggcagtgaggattttcactggcttcagggctctgtgcaataatatagaaatagagaatctcacactgaagccagtcaacaggaccaacttcttttagccagtcctgtctttccagcagcatcatgcaatctaggacataagagagcccgtgtcaaaccatttttatataccgtgacactcttatttttaacacagtggttggattatttataagcaatcttggattcattcaataaccacaggtagatagtgctctcacctcattaaagcattattgcaggccgggcatggtggctcacacctgtaatcctagcgctttgggaggctgaggcaggtggatcgcctgaggtcaggagttcgagaccagcctggccaacatggtgaaaccccgtctctactaaaaatagaaaaattagctgagcatagtggcaggcacctgtaatcctagctactcgggaggctgaggcaggagaatcgcttgaaccagggaggtggaggttgcagtgagcccagatcacgccattgcactccagcctgggtgataaaagcgagaccttgtctcaaaaaaaaaaagtattattgcagagaaggaggtactcttagaactctggactctgttagcaaaagcgttggggattgatagtgatttaattttattcatgatgctgagagagtctcaccggaatgcagcgaggattttgcccctcatgtcatcaagctggtagtactttgttttatgcccggtttcttgtctgatgcaaccttttatgcaccatagtgaaaagttgtgcttaacatgtttatgatcccatatttggaaatcttgccttatttggattttgcaggtttgatagtttgataattcagagaggttggactcaaatttttatctataaacaagggatttactaacaatagtttggaatgatatgactaagaaagatgttcattacttacagatctctttagaagcatcatttacatacaataattacctgactcagaagaaagtcccctagggaagtcatctgacagtcctggtcactgtctgtgctttaaagctggctgttactgaagcctttaatgcatactgtttttcttcccaggtaatctgcaatagtaattatggtttagttgagtggcctcccccagttgagaaacacaatcataccatgcagtaaaaaatatttaaagcacacttatagttctagaactttgcatggataactctaattagtctgggagcgcttccctggagccgaatgtgtttaagaattcaatcttttaagtgccggtgatgtcagtttggagacagcagtatgtggctccattccaccgtgaatcctttgctagctgcagtgtactttagctaatagaatcaagtgcttgtcttcaagttttttaagagcataaaaaccctgtttattaaaacaattctctttggcactttgcagcattatgataatgctgtcttagcagaagtgtagagagctgtgaactcctagggggaggctctggaggaggaccattctttcccattgtatttcttcgggacaagcatcatttctttccttagtcaaaggctttgtctcagcttgcacttcacgttttgaatatctttctggagaaaagcaacagcaagtattctggatattacgcatgatgatggttttctttgatgcctatctaatataaactcccattctcctggaacctcacatattttaaaaaatattacttgaggctgggcccggtggctcacgcctgtaatcccagcactttgggaggccgaggctggtggatcacttgaggccaggagttcaagaccagcctgggcaacatgttgaaactctactaaaaataaaaaaatcagccaggcatgatggcggcatctgtaatcccagctacttgggaggctgaggcatgagaattgcttgaacccaggaggcagagattgcactgacctgagatggcaccactgcactatagccgaggcagcagagcacgaccctgtctcaaacacacacacacacacacacacacacacacatctttgaagtaagttactgatagggatggaagtcttccaaatctggaaaaatcaatgtatgaaagatccataaatattctgaatttgtcttaatgtgtctatgcacaatgtaaggaatgcattgataggtttctgtgctgttccccccacccccaccgccttttttttgtgacagagtcttgctgtgacacccaggctggaatgcagtggcatgatctgggctcattgcagcctcaaccacccgggctcaagcgattctcccgcctcagcctcccgagtagctgggactacagtcctgcaccaccgtgcctggctaatttttttttgtgtgtgtatttttttagtagagatggggttttactgtgttgcccaggctggtctcgaactcctgggctccagcgatccaccctccttggcctcccaatgtgttgggattacaggcatgatccaccgtgcccagcctgtatactgttgctatatagaagagtctagtaaagtctggctcatatttgaacattcaagaaatagtcgttggtcctgtcgctcccagaagctgcacaatttttgagtaaacgtagccaaagttttcagaatcactgaatgctgctagttcttttcttttcgtgattaattcagacaggccgcatccctgcgagacccttcttctcccacctccaccaacatccacagacctctccctccaaggctacaaccaccgagccctctgacagatttgatcgcactgctcaggcttactgtcctcactttgttctgtgtgtggtttggtatttttctgtcctgcccacccaggccaggccttccccacggtgctgtgatagagtattgttatttgttgcttattgtctggagaaaatctctcaattccatatcaaactgttgtttgaggccttttgttttcattgtcaaatgtgtcgggtggcagtctcatgaaaaaaatcacatttgaaggtatattcataatacctggtaggaagagaaaaataatggtgttcctgtgacctgtttacctgattctgaaactaaacagtgttgcatggaaagcgattttagcgatcttagaaaagaatgtgttgtgtcttttttttggaaacccagcgattcagttagcatattatttgtttgcgtgtatcttaccctttcaagaactctaaggtatgtgcgacatggtaaccccaatgcaaacggcattaaattgtggaagcaggaatggtgttaaaaggattcttagaggtggtgccggttaggaggaggaaggaagccgttgcatgccaggtatggtgtcaccacacatatttcgtcctggtagtgatcctgtgaattaccctccgtgaccatgctttgtggttgagcacagtgagtccctgtctgggcaagggatgatgtagcagcaaatggccgagctggctaggagtcacacccaggcctcctttgtctacgttggattactttttctgtgtctaccagcattagaaaatgagaaaagtgtcattatttgcaggaacatagggcatttcaggttaggaaggaagcaagagtgaaagtctaggatagaggtgaacatgaaccaggatattcggggaacgatgatcagacagtccagctggagtggggagtgctggtgtagggtggggaaggaaaggttggcaagaagtcacgcccttctgcccgactgaggaattggttttcatcatctataggaacttttgtaagtttttgaggagaaacactagtgagtgacaacttgggagtggtgtttgaccataaaggttaggcagcctgtgttgtgcaaagtgattatacaggagcaagatttcaggttgtgtcaatggtccagggaggcggagtaaacagacaggaagacaggaaggagtaagtgaaacgttaaaagatttgggtggttgcagaggggaggtggtttgaggaggaagattattgtagcaccatctgctggcaccagtactatctacaccagagccattcctcttcctgtgctgcaagaacccccgttttgttcaactgtccaacccttgcccttgtaacttgggtaaatcctgactgctttgagacagtcgtgggaatacccttcaagggtgggcatgtgattcctgttagtgagcaggtaacttctgagaaaggtttctttaccctaaaaagggacacaaagaagaggttgtttcagctgctgctggatgttgccatgcgtgcatgtatctcctggagcagtggcagccatcctgtgaccatgaggaaagctggcagaaggaaacaggaacttcgtaggtggttgagtggctaaattaattaaccctggggttttcctgcctcagacctttttgtaagattattaacctttattgtttaaggcaggggttggcaaactatggtccatgagacaccagccacttaaaaaaaaattttttttttaatttttaagagacgaggtcttgctctgtcttccaggagcatagtggtgcagtcttggctcactgcaacctccacctcccgggctcaagtgatcctcccacctcagcctcctaagtagctgggactacaggtgtgtgccaccatgtctggctaatttttgtatttctcgtagagacgaggttttgccatgttacccaggctggttttgaactcctaagctcaggcaatccacccgccttggcctcccaaagtgctgggatcataggcatgcaccaccatgcctggcctcacttgttttttgtaaataaagttttattggcatgcagcaatgtcatattgtctgtggctgcttttgcattgcagtggtggaattgagtagttatgaaagagagacagtatggttcacaaagccttaaatatttgctatctggtcttttagagaaaaagtttgttcacttctggtctaagccattttgagttaggttttctgtttatttgtagccaaagcctgtttaagatgctggccttgttttgtacctcttaactggagattgtcctgtaggcaagggctttctagagctgttgtgctgtcaggactgaagatgtgcatttgggattcactttcatatcacagaaagcagttaagaaagagtttctaagtatggggggatttataacatcaagtgcagatttgttgcaatttcaatgtggtggtgaaaagccaagatggcaggtgcttaaaaagggaatgagtgggaagatcaatttattggcataaattaaaagaaatgtttcagatatttcacctgagaacctaggatgcatcttgatggtcctagattatgaaagttaatgtttaatctgacttgctccaaacgaggacaaagttaggcaaaaatgcatcccatgtaacttgtttttgtggcctctgtgattcctcctcctgacctctgctgtgctggtactgagcaaagacttaaggtatatatgagaccctcatgtataatggtttgactgatagccccttacttgtatgatttttttctcatcgtaaatggtgcttttacacagtaattgcccgactcacgtgattcacttcgattccactctctgtggctgatgttgcatgaaggttgtaggcactgctgtgccagagtcaacagggataaagaaacctgatagattgatttgatggcagggatgtgtgattagagaaggtcgaatccataggcctttgcaggaagcagggattccagcaccgatatcgagctgtcttcaaaatactaatgaacaggtgagatgtcaaaggaagacagcatgaaccaaagatgatttatttgatcacttcagggggaataaaaccagttgaaatcacattagaattcaagggaaactgcacaagacatttcaagaaagttgaaaaagatagtccagaaaagttaagctgaaaaatttttctttctttttttttttttttgagatagaatctcgctctgtcacccaggctagagtgcagtggcacaatcttggctcactgcaaccttcacctcctgggtttaagcaattctcctgcttcagcctcccgagaagctgggactacagtcatgtatcaccatgcccagctaatttttatatttttggtagagatgggttttcactatgttgctcaggctggtctcgaactcctgacctcaagtgatccgcccactctggcctcccaaattgccgggattataggtgtgagccaccgcgcccagcctgaaaatcttgaaggagaaggctgctactccttgcctgctgcagatacttaattttgatgaaatagagagtaaaggatcattgaaggagtcactgtaaatttaaactcgtacttaagcatatactacctgaagacgtttaagagccattaatgtacatgaaagtattaggtaaagtttgagataaattgtcttatttttaaatgtagttggaagatctttgggggtgataaagaacaccttttttgtcagcaggagatttctttttgtggtagtttttcacgctcttccgccagatccaaacttcttgagagtgtggactgtgtctggttttgttcagctaaaatctgacatagtgcttggtatctagtagatgcttcataaatatgtgttaaataaatgtgctttactcctaattttataagacttgtgttaaggctgcttcagtagtcaagctccgcatagtagaaacatcttccaaaatgaagattgacaacttagctttaatatcgttgggtttcatgaacgtaatacatgtgtctgaatgcatacatggggttttactttcttttcatgatgggttttgatatatttaacgtttgaaattgatttttagaaacagaacctcagtctgtaccattacagctctgggaagtgagagttttctacttcactgtggtttgatttgtgattatcatttaataaccagttagtagtgaggggttgcatgtacattgcatggaatattagggctgggaagagatttagtgatagttgcatctagtccatttttttttccaaatgaggaaactgaggtaacttcctcacctaaggtccaactgctgattcttttcatagagggaagctaccgcctatctggttccttctctcctcactgccctatcctccctgcccccaatcctgcctgtacctccctgcaaaatttaggcaaaggtagagtccatcttcatgagagtatacattgggtaagagaattaatgtgacggataggaagaagttactataggaatgctgggagtggtggtttatgtagttctctgattgctttaagaccttttactgaagtgaaacctttattcttagcagatttgggttcatggatgtaagcatctgcttaggcttgtgaccagcatctctgtggtctgtgtgatagaatactgcttttctctgcacccttcaaggactcctgagctacacactctttatatgatagagaaaattatagatgtacttatctgttgggtggttctggatgaaagttccgttttctttgtctgcacagcccctgatgagctcttccctgctctgctgggaactggccctcatcctccttttccatcaaggttcctcttcaggctttgagcggatccatgcggagagagaacagtctcccgcctttccccatttcaagtccctggagcctctaggctctggggggcaacaccgaatacagggggcagagtgtggtgcccatccggcatcatcagcttttgcagcctcagcccccagctgactacagggacacctctgccatgcctcctttcccagggccatggctccggaagagccagtatctggagtcatggccctgggaccagaggcatgacagaggtctccctgtagtcaaaacctgtgcttgggttcgtggtaagccatctgaggcatctgctgtgttcctcccctattcttaaggggtggtctctctctctcagggttgaagcctaaatctggggcatgggtctgatgcaggtccttagggggccagccctgtggtgcactgagccacaaagaggttccagattgaaacccttacagatcttcctccattagtgcttgattttcattcatggtgcagagaacttgcaggacaaggttcatttgcccttctctaccattcctcctttgcctttgtccacatagatgaggagcaaggtggccttcaggagactttctggggcactaggaaatggccaagtgataggatgcagagttgaagacggctgttttaggccagggctcccagcactgtagcttgattactgctgattacttcagttcctccaaccaatcctttaccttccatgcagagaggaaaagtcccacttactgactggcagagggctttccaaggaaatcacaggccccaaggaaaagtggagtgttaatttgcttcatggggtgaaactgctttctgaaagcatggtttgggcctccagtttgtaataaaatcacagccagcccttattgttcacactggaaaatttattcttgtttgtgtaccactaatgactagctttcagaatgcttactttcttctcataattgtccactaatttactgtccttctgatgggaagaataacaatgtatttgaagttccttgggctactgggtttattgtttttgatacttttagatatttcaaacatggaccttttacgtgctttatgttgcgcaatattcatatttattagggctatttaatagcgatgcaaatgagttcagtgcagctgtgccggacaatagtcatggaaatgaattcatcttgttgcttttttcttttcttgggtcattctgatcttttcatacttttcttaatggaacaagcacgtttcttcaggaaaggtggcctcatgttttcatttgtctgcaggacaaataatttgagtttcatttcttcctgtggctcatgatccaaattggtcagaataaagttggttgcatcagaaatattgcagaagtttagtctctgctctccagaggttggctgagaaagcttcactctgggtagctgtcgcttcccctctgcgctccagcaaagtccatgctcatcagtgacacacatgcccttcccctccattgtattactcttaaattccttctgaaactaagaatttagcactaaatggaattgattcctgagttggacacattagtagttcaaccctggttgccagctctgtccctcttccgcacatcatttgcagcttttaatcttcactgaaagccaataattaagtatagcagaattatgtctgaagcaaggccaaattggcactgggtaaacctgaggacccgtcccatggaaaaccagtaataatttccccccgcatcctaattcttttttcatttcaaatcagcatttccaaagcactttcaagaccgttccctttttttatccttaggctgaaacatgccctgaaaggaaggggagaatgttttagtgactcatattcaagaaagagaacattgccaaaaatttgcaacaacaaggtaaatttattactcatgcaagtaagaagcagagctctcttcagtggcagctttcctcagcaaagctgggagccgatcttgtttaggatcttgggaagcgtgaagttcgaggctggtcaggctttgagaggtgggagtgagaggtcattagcagggtccttggatgagtgccttgttgatcagctgttgacaaaagcatggggatgtcagaagcccgtgtactggttctgagctgtcattgattcttaaactggtagtttcttgttaccatgactacagatcattcccccacctttacttcccccaagcacactcttcctccacatacgctttttgatgttttctcagacaaagcttcaggagagaccctcagggagaatcttccctgtggtgattaatcttcctccctgataatattttattttcagggggtctgattttcatttgcattaaatatgtgagaaaactacggcttagggaggtcatggggcttttctaagttcctgtatttggccagttggagaacctaggccttgtcacttcttgagatcttaagagtcttgatgccagggactgggccttattcttgtgagtttctttggtattttgcatgtagtaggtctgtagttgctgtttgttgattgaataagtgataccaccagtgcactgagcaggtcagattttgtttctaagtcagcacaggacccatcagtactgataaagccccaaaacccccacctttgcagtcagcctattgtgtatttggttggagcaaaagtaattgtggtttttgctatttttttaatgggaaaaactgcaattacttttgtaccaacctaagacctttcagtaagtgagagggcagcttgtgaagccaggctctttgtgaggtgtgagctactgaaggttaagtgtccaaaactagactctgatgtgtgcagttagccggggggaaggaggtagttcagaaaaccagaaggtggcagctagaattaataatccctgcctcctagtttggatataccctcactgcctttttttaaaagcaagaactctagagattaagtgttccaatagctgggatgcttttggaaggccgtgtatacctcagtgtatgtgttcccagtagtgtgtgccctggaggaaaccccagggcccagagcttccctgcagccccggccccagctctggccccggccctggccctggtcctggccctggaggcatcttctaatgaaattacctccactgaagtttcctataaacatagtcaagagcagcctctctccctgctgagctattgcagatccctcccacttcctcttctgctctcctttctctgaaacaccaagtgaggatgcgtgtttgcttgtttatggatggagtagctaaaggagcagggatggagcttgagttcctccagctcagaagttgatctgaggagtttttttcatttttgttttttatggagacagagtcttgctctgtcacccaggctggagtgcagtggtgttctctcagctcactgcaacctctgcctcccgggttcaagcaattctcaggccacagcctcccgagtagctgggactacaggcacccgtcaccacgccctgcccattttttatattttagtagagactgggtttcaccatgttgcccacgctggtctcgaactcctgagctcaaatcatccacccatcttggcctcccaaagtgttgggattataggtgtgagccactgcacccagtccacctgaggagtttctgaaacatctcactcaaacctccagcagtgaggcctgggcacctggttgttaactgagtttccctgaggaccctcagtcttcctcattagtaggccttgccctggtcaggcttcctcagtttgtggatggagcaggtagggcgcacggaggtgaatctcctgagccaggagcagcagagccaggatggaccctgacttctagcttccctcagcctgagctctttctctcctgccacactcttcttgggcctcttgctgtcaccctgggcttgtcaggtgccagcaggaactcttgggcaaatgggtcctatttctgcttgagtcttgaggtttggagcagcttaactgggagagaaggcagcatcctttaatgggggctggcagtttaatgccatcaaggggtaggatgggagtgtgaatggaagacagcccgtcttcattagactttacaatgtggcttatcaagtgcagtgtttgaagaccttgtgaagacatcatgagcctcacagtgctaagagggacctgaatgaaaggaaaacaatggctttcaatgatgatttgggaaacatggatgatgcactgatctgagcttatagatcctgtccttgggtgaacagggagaggtcagaaacaggaggatgcttaattcattccagccaccgctgctggagttgttttagcaaagctccccatttctgtagttggtgctggcattttgacgatttccccctttgctatggtgatctggaagcacagagccagatgtgtagctgcttctttgttcctaggcacacgccttttttccccgaatgtggccttggagtcagattgcccaggttcaaactttggttcctcggcttgttagctgcatggcctagacagcttgcttaacttctcttgcctgggttagaatgatagcaccccagcagtcctaataacaattcctgggctacagtatttactacctaccttgtggggttattatgaggaacaagtacaatcataacatcaagggctgagagccttcctagaacacagtaactatcccattaatgttcacagaactatcaccactcatgaaatcctagcttgaatatttacattagtcttgtttctcaaacttgactctttggtttgatcgacattttccctaatgctgattttcacctttatttctactttgctgtttgtattcttgggagtaacctttgatgtatgaatgaaataaataaattcaaatgccaggcttttaccatggggtctaatgtgcttgaaatcagaatgcaatagacgcttttgctaagcttgagggcaaagaggggctagtgctgcatccaggggtttcagcctggggactgcgtcctggccctctctgtccaatgccttcctgattctcccccacttaagttgctatcacagtaccttgctagaccaactaactagcacagtttgagacttttctttccttgctctgacttctttgtaagtgcagcttatgttgtcagaaagctcaaaatgttgtgacaataaggctgcagtcccgtgcagccggcgttttgtcgtgtgggtgtgatggtgcttgtgtgctgtgttcttattggcaatcgcgagacgcactcacggaatcacagatgccgcctacaaaaggtatctataaggtatctatgttccataaaagcaggtagcctgtttacttagccctggactaggcctctgggagggaggagggagaggtgggtgtgtgcaaatttggtggggagaaaaagtgttatataaaattgggaagatataaagcactgacaaaaagaaatgtgaaaagatgtgtttaaaacaatgcgcatgaagtgcgaagtctatggggcggttctgatgagcaagcatggaggactttttgggggaggggggtggtcttaagctgtgtcttaaagccaaaaaatgtgaagagaggtttccagatagagaggatgccatgagttaagtggatgcaggcatagcgctaagaataaaggagattgcgtgtttgacatgaccatcgtgaaggacccatgctctgttgaacctagtagtgaggttaggattggagaggccaagttacaggataaggaaagtagctttgtcatcatgggcaagaggaaaccactgcagcttctgagtggatccatggtgcaaatgggtggaaactggtgatggctggcaggggaaaaggggggtcccattttcaggcattatggagaaaagttaccaggatttgttcaataattggatggtaaagaaaaagagtgaagaaaaataattccaagtcttcagtgcttgagaatcaagaggttggatggcattgatgttgaatgaaaatcttgtgaaagctggagatgaatgacttagcagggggaagtcttagcactcttcaagagaggagaggcagtatgtccctgaagtttggattctggactctgcaatcatctgggtcaaaccccggttctaccagtcattagcttttgcaaccttgaccaaatgaacctctgtctgttttccccatttatgagggtgaaaatagcacctacctcagaaggtggtggcgaggattaagtgagagaacacacgtgaaatggttagaacagtgcctggcgtgtggtaagtacccactgaatgccagtgcttttattacggtgaatattcattgtattgaaagtcagacataggtgtggaaccagttatgggagtgaggataagtctagatttgggaatcagtcgcagagaggtggacgatgaaagtctgagaagaaaggatcttgctaatggagtgaactcagagcttgataaagggaggatgagtggaaatggagctcaacgctgtgccttgggaaatacctctgtggattggtgggagcacagtgagaaattcaagaaagacacagacaatggaataaccagagaattaggaggcaaatcgagagactgtgttgtcatgggaaccgaggaaggagaattttttttaaagatgtcgtataagtcagatacaatgagaattaagtgaaaattgaggctaacataatgtaccactgattaggcttgaatattattaaacatgctagagccgttcagctgtgggatgattgagaagccagagtttatgggatatgggaaccgtgatgggagattataggaaaaagatggagtggtgcttagaagaggcagcagagcaaacgaagccaggagttaagaatttaaaagctatacaaagagaactaatagagggcaagaaattagaaatacaaatgcaggcaggaatgcatgtgggagaccaggtagggagttggcagcatggggaacacagaggagaaaggccctgctgagcaggtggagaggaccttttttggcaaacaatggtgggcagatgtgtgcagtggtggagaaatctggatccaggggaaggcacaggctgagaacaggttttctccatcataataaatatctgcctgtgactggtataaatgtcgatgcttctcaaaccttaagaaacttccagcattttgttttgtttttcaaatgataagtttcttattcatactgcttctaagcattgggaaagaagtaactcagggagttttaaaaagcttttattttaaagaggtcttgtctcccaggaaacataacttttggaaacagtttacaaagaatttgctttttctcactgacagatagggtgtcttttggtgggagcagagccccagagccagaggacctgcctgcttgcttggcagtcccccgagcagacacaatttaggaacaggaaaccctagagaaacctgagtcaggatgctgtgggtcccagaagcaactgggtagttgtttcaagtttcctttttttttttgagcggggggtgggtggggcgggggcggcttcaaactggagattagcaaaaatgagttggatatttccttagacagttcaaaccctcataggtgaactcatctccgtctctgtttctgcttagttttctgcacatcctttctaagaactcacttatgtctataaataccttttaacaggttctcttcatatttggataccaggagtaaataagtgattttgcaagtatactcaaggattctggactaggtgctactgtgccctttatacagtctggtggggtttggggggtgggtgtgtgtggaaaagagaaactcccaaaccctcaaagaggatggggaacaatgtcctgaaagaacagggctcaggcagcagaagagctgaggggtctctgttctgaacgggtcccccttctccctgcccttcatcttgtgtgactgcggttgagaaagacctgcaggattaaaggatctggtgaccttgggaccccgcacttgcttggcagtgacagtcctgaggaactgtattctttcagttcctctatcagcaaagcagctcagtaggtaaagggcgaattccggcatttcagtgtctcttgccatgggtagctctcatatttccagttgatgatgtctggacacgtgcccttgtgaaatgagttgagtggtgtgagattgggagcccaaacctgtgaacacccaactgggctttttcctggccataaaaagctcgaataatggagagctttaggaaacaagttgtttgaaaactctgttgagttggctttgagcattcgtggaacattatttttaagaaccggttatttcatttaaaacagagtaaaaagagaagatgattgtattagtctgttctcatattgctgcaaagatactacctgagaccaggtactttataaaggaaagaggtttaattgattcatggttctgcatggctggggaggcctcaggaaactcacaatcatggtggaaggggaagcaaacatgtccttctttacagcgcagcaggaaggagaatgaacgagtgctcagtgaagggggaagccccttataaaaccatcagctcttgtgagaaactaactctcacgagaacaggatgggggatactgccccccatgattcaattatctctgcctagtccctcctacgacatgtggggattatgggaactacaattcaagatgaaatttgggtggggacacagccaaaccatatcagtgattgaggggagaacagggaatgaaacatcccctctcaacagtggtaggaataatggcctgtcatcattattgtcagcagtaactgacatttcttgaagacctcagtgcataaggcactgtactgagcgctttatattctgtgtcttgtttaatttcattcaaccctcccaacagcctgtactacattaaatactactgttacccacttttcttttctttcttttttttattgagacagagtcttgctttgttgtccaggctggagtgcagtggcacaatctcagctcactgcaacctccgcctcccaggttcaagtgactcttctgcctcagcctcccgagtagctgggactacaggtgtgcaccaccatacctggctaatttttgtattttttagtagagacagggtttcagcatattggccaggctggtctcgaactcctgaccttgtgatctgcctgccttgccctcccgaagtgctgggattacaggcatgagccatcgtgcccggccttttacccacattatacaggtgaaaaaaattatgttgctctaccatttccacaaatggcataggctggcctattactgtccttttccaaaatacgtgtctctcaaatagctctgcagctcttacagggctcctcgttgtcctctgtgctttacagtttgagatccttcacgttggaggtttgtagaggaccacagttgcaaaatagggtgcctggggtctctgcttatctgcattttgtcaaaggatactataggtcatggcgcatggtcttttgctgatgttcgttttggcaagaagcactatttttcatcatttgccaagaaaaccttttgtgcattttaccttaaggacctggatagcataagcagagaaagggaatcagcatttccatgttttgaaaagtaaaacaagactctttttggtctttgcgcccccatgccctagaaatcccataataagtgcaactgtctccttctgctgatggatttcctaagtcattcccagaaagaagttgggtgctttgtattgtattaatatattcatcctaaataagggtcttggggttttccccccttccaagatgtattaagaaggttgcttactgtaggctttgatttatttatttcctatgaaatgccagaaacaccaagtcctaaaatcctagatccaagtcattgacttctcagtgattatgaccacattgaattgattaaactcaagtgactgacaaggcgaataaaaatagcccaaaatgagtccagaccccatggttttaagagccccccaccagttccctaaagctacaggacggaaaggactcctgatcctttgtacctgaagagtgtggtgcctaacgtatagccaatgttcatttgtttcttctctctgtattttataaacataattactttgaatgaattgggttattcgggaagtcagcacatgtctccatctcctgctttctatttctagagtcctaagatagactttgctgacaagaagaggcccctgccccttcagagcttagagtgtagcagagagatgggtattcaggaaatcctcaaatagtgacagagccacagcggcagtgagtgacaggcaggagaactataggatgctggaagtgcatacaaccggggtgttacctagtctgggactggtggtcaagggggcttttttgaggcctggacaacccacagaccgagggtgggctagtgagagccagtgagggacactcttcaagatcccagcacttaaaagattggttgggcatgatgactcaggccgggaaccccagcactttgggaggctgagatgggaggattgcttgagcccaggagtttgagaccagccctggcaacaccgtaagaccccatctcaatgaaaagtaaattagtcagggccgggtatggtggctcatgcctgtaatcccagcattttgggaggctgaggcgggtggattgcctgagcttaggagtttgagatcagcctggcaacatggtgaaccctgtctctactaaaaatacaaaaaattagccgggcgtggtagcaggcacctgtaatcccagctactcaagaggctgaggcatgagaattccttggacccgggagacggatgttgcattgagcccagatcgcggcactgcactccagcctgggagacaaagcgaaactctgtctccaaaaaaaaaaaaaaaaaaaaaaaaaagtaaattagctaggcatgatggtacgtgcctgtggtgccaagctcctcaggaggctgaggcagaaggatggcctgaggccaggagttcgagattgcagtgagctgtgatcacacctctgcattccagcttggacgacagaacaacgccctgtttccaaaaaaaaaaaaagattggggtgctcttaagctcacagttctggccatctcctctttcctaagtggagggagatcgtggatccctgagggggaacctacttcccctttcacttcaaagtctgcttctgtttctaaaaatgaactgaaaccccatctgtttgctcatgtatttgaaaacccttgaaaatgtttatttttgtacatcttcatacgactctcgtctcagagctgcttctcctcttcaggtggtttctgggcacactggggacgtctgtgcacctcctctgagtggaagtcaatgcctgtgatcccctttctaaaggaggcacggatagctgctgtgcggttttttcaacctgtagccagttttcatgtttttgttctcaaaataatactttttttttcaggtgaagacaaggaacatttaatttacactgaaatgatttttcctcttagaccttctgaaagctatgacgtatgtatatttataccataatagatgctaatggtgtcctctctgggtgatggtcccagagatgtttataccacggcatttcactccactaataaatgtgggtggatggatggacgggcggacagatggaaatatcacacaggactgtgcccaggttccagacagtttggctttagggccccaactctgccaagggatattttttatatagcatcatgtttttcatcatgatgttagtctctctctcttttttttttctttgagatggagtctcgctctgttgccaggtgtgagtgcagtggcacgatcttaactgactgtgacctctgcctcctggattcaagcgattctcctgcctcagcctcccaagtagctggggctacaggtgcctgccatgcctggctgattttttttttttttagttgagacagggtttcatactggccaggctggtcttgaactcctgacctcaagtgatccacccacccaggcctcccaaagtgctgggattacaggcgtgagccactgcacctgcctgtaacatcatgatgttacagtcccccagctcctcacctggcctccctgtacccattcctggccccctccctccttcaatctcttttccacttcagagagtgatctttagcattcccagctccaccccacgctttctgcctgtaatcatttaaaggcttcccattgcttctaggatgaagtccaggatccttaaactggcctacaaggccctgtatcatcagctgccctgcgtctccagccgcctctcctcatcacccacactttttcttcatagcctccatcccagctgtaatgcagaattttgtttgataattatttaattcatgttcacctctcccattagactgcaagcttagcgaggccaggggctgttttgttgtttacccttgaaccccaacccatagcacatgtaagtactcatttgtcaggtgtttgtgtttcatatccattttttgccttttcttacatacatggacacacttttctctcttttgagataacttccagaattgagtggttatgagcaattcctggatccctgtttgcctcagagccggtaactgttctcaccttttgggaaccataaacgctgccattgttgacctgaacacgaggtgactctggcaggagccctggccatcgtcccttttttggttatcatctgacgtttgtgcagctacacacatcatatctcatttgatctcttggactcccgttggttagtagaaaccttattttatagacaaacagctgaagctcagaggtgttcagaaacttttgccccatttgctgcaagtggtccatgagggtctggaatcaagaccttctggttctggtttgatgctgggactgctctttctgaattgtttctatgcctgtctgttcaatgttataatgatgagggggccagtccctcaccagctgcattctaactggaggctagaaaataatgaatgggaagtaacttaggggaaaactatgatgaggttgttggcatttgttactcttggaaagaagtgtagccttggaaactagaggctaagaaataaagtgaggcttcttagatgtcgttgtgtattaaacaggaagcccgtttgctctggctgtagagtgtgcccatgagagtttatggaagaatgaacttgactcaataaataacccactcagtgcatgatacccttttcttcagctgcaggtaaatgtctgttatggtgagtgacatggtggcatgttgggctctatgaaactgagtccacacacagcctgctgtgctgcctgccctgaaacgggacaggcccttggtaaatgacttgctactgaatggtagtcctcacgatgacatgtgtggcccatttaatgagagaagtaaagaccgcagaggatggaggaaagggcagggggagaagttagctaatattaaattcctgaccacccacacctaatgaaaaagaatgttctctgcttgcagaggcagtgaattaggctggcaaggtaccaagggaggaggaaaagtgtgtgaatggatacccgctacatctgagcacagacttaacccagaaacgcaggcggtcaggaaatctaatgatggcttcggacctgggcagacttgagttgagacctgtgccctccgcctcacgagcctcagaaggctgttgagtctttttctgagtctcagtttctcattctgtaattgggggatgataaggataaaacctgacaagataattgtgactcaaatgccagttcctagtactggtgttagcacaaagctgagtaaatactcatggattcaaaggcgcgagatgtcataccatccaagttatcaggaatgtgtttgctgagggctccctgggtgctgacctggctctacaggttctgaataaagagttgaacagggtctagttcctgtagtcaaggcacttcagatagagagaaactggcttgccaccaactctcatggaatcccagatgtgtgtgctttcatagttcaacgttctggaatccagaggtgtcttacatgatggcctgtcatagtttaatgggccgccttttatttcttggaggtacatctatgatggctgggggtgtggattctcagagacctatcgtcagatagttccttggagcaattctcagagctaggctgcttaaggcatatgagggctcaggactcagagccctccttctttatgaccttccagggaacatcccttttcctggagtgtaaaatactgcatgttatcaggtttgcagtttccttgagttagggtgggggtgtcacaaggcttatctttgaggctgaggttcagtggatttggagaagtgtgttggcaatgaatttcggggagaatcttcccctcgttgtctgcctgtgtaagagttaattttagcagttgtgattgtgaattatttgtcaaaagatactcccacttctgaagcccttgtttgcacctggtggagacaataaagcttctaagagcaaaatataattttcttccctgcttgtttcttttcttagcattttagaaaatcccactcagtttctagagttaacacctttccccactaatcagaacacaacacacaacacacacacactctcacacatacagactccctcactgaccttatgggccctttgctctgctaaacacataggtactggatggagtttgtagcaacatgtccctgccccgaatttgtcatccagatgtcgcctttggatgtcatgtccttgacattgacccagggtgggacttctgcagtcaaatgctctacccctgagctatcccccctacggtgggacttctgaataaagcctgtgtcactgtctctctggttcccttcagcgggagctctctgtggtttaatggagtctccacttgaccaggagtgtttccagatgagaaacccagggagggctgcaagcaaatgagagtgaaaactgagctctgtcccactccaaatggcatccgggattcacataccaaggctggctgggaacagctgatccaggctgatcctgacactggagagtccaagcattggaggccagaggccattcagaagaattacctcggagtagaaggcttcctaatgagcaataaggaggaactcccccattcttagggcacaggcctaattgaaaccatcctgggaagagaacatctaattaagtctgactcctcagaggactcaaatagttatatatgaagaaatgctaatctcgtggccttacttgtggctagggaacctgaggtgatgctcaggacagcaataccagcccttacggccttgctgtgtgtcctgggctgtgaacagtgcagaagtccctgtctgttcccgtgattttgacagaggatgccagaggcagaagtgctgctctttggtggtgtccttggtggtgttttcatctgtctacattagggttgggttcactttttttttttttcttcttttttttcttgagacagggtctggctctggctcaggctctgtccaggctggagtgcagtggcatgatcttggctcactgcaacctctgcctcccaggctcaagccatcctcccacctcagccttccaggtagctgggactacaggtgcgtgccactacacctggctaatttttgtattttctgtagagacagggttttgccgtgttgcccaggctggtctcaaactcctgagctcaagtgatccgtgcacctcggcctccctaagtgctgggattacaggcttgattccagccaaagtgcctggctgactctttgaattagaagttaaggtgagttttagaactctggtcttttctgtgatttgaaatgttgcctctggggaaggtgctgttttctagttttatgaaatgatagactctcttcccaacacacacacacacacacactcacacattcacactcacactcccacctcttgagaagaccacaggagctgtggagacagttgtccttggtgtggccagcctggttgtgggacatgggccttaaggtgcagcacccccattcaccttctccaggatggaaacaattttcttcttcctcattggccttgctcaagaaatatgccaggcattttcaatgtcttctgtccagacccagaaggatactcagactacttctgtttaaatggggcttgtttttcataagcagttgcattgttgatgtggctaaatttagacagaaccccatctagattgtggtcaagggctatgaatgctgcctccactgagcaccaggtgggcttgtacattttggtgactcattgctgcttgtgatgagaggggcctgcacacttaaacccctccaaggcagcactgccctgttcagtcttacctatgactcaacgtcaggaagctgaggaccccggtagcctctagaactgaggtgtacccctgggctgcagtggaagaggatcttggggccctagtgatcccctagatctaaaaagcaaagagacagcttagaggaatagaggatttggtcagggtatgtgtgtgttggaggggtcagggcagttattttcttgcactgaattctgagcataaaaacttctagcttgctttgctttttgtcacccagcgatttctaaagacagtacacttgtgtgttcaaatcccttttcacacctggagaaattcactcttgactcccttccagtgtaagaagtagtttagcatagttccggaaacgcttcgatatcaagccatcaaaagacagactgcgaagtcactccgagtgtaagagctctctgtatgtagaggaccagctttctgagaatgttttggcagggacttgaaaatgtcagtcatgtgtagacagggaagtgtcataccattaagatgtatacgggatggtgacagagtgagagaggccttggggttttgaaagaagggagtgatttttgtagtcccaattcattgtcctctgagtagctcttccctcagcctcttgcatgcgactttggctggtcggggatgccaggcgagttctgagccggagactcatggggagtcctcttgtgcagctgacaccttctggagacaccttcctcactcccaaaggcacggggccttagtgctttctgagtagccaccttggaccatcggttcagtaatttgaatagtaaaatgtgggatggcgttttcttgctaaagtgcagcttaactgggggagtgagttgttaaaagagcagggtggtagcatagatgacaggcgttcataaagcactgaatttagagatctggacctggactgtgctgctgaatgtggaaacctagactcagtgtgaccatctctaagctcctttgagcttctaggagtctgtcatcaaaggtggtttccaacagcctccagggccccctggccctttgtgctccatccccacctccgctcattccagtttcacctggggctatgtggctacctcctcacgtctaggctctcctccttctgagatgctctttctctttcttgtttactggagggcttggctaagaccaaacttgggtaccctgggcagaactagggactcctgtgcctcctttccagagcatcgtgtgtggaccctttttgtcgtgtagttatttggttatttttctgcttctgtcgggcagtgggtatcgacaggtaagactgccttatttgccttggtatctaggagcactcaaaagtgaatagattgaatggaattaaatccttgaaattacagtagaaagcttaggttctttagaatagaatcgtggtgaaagatggcctttgtgttctgtgtattctgtgccctttttccgctaacaagttgatatcgtgctgttattttgttttgttgataacatagtgtggactttgtacttctaaaccttaggaaaacgtggatcattagtcatttttgtcacattgcagtctgccctaataaacatagtattggaaaaacgagatctgttaaagggaatgatgaattttgctgccttggagcttgttgatacctgaaaattggtttcggaaatcgagacgcctgatggaagtttgtgtgtcgttttggctgcgttaggctcttcttgagccctattaggctcgatgccattaaactgctatgcgtaatgagggtgacacgttgcagtgaactcccatcctccaaaggcttttaaactttagaaacctgtgtatatgctgtgcctaccctttatagtatatattaaaataaagtcacacaaaaatccaagtttagtgattaaaataacattagaagtgcataattcacgttataaggaaagtctctcctttcagaagaattcactgtggctttccctgactcttgacatatgatttgatttacaccaaaccaaaaaaaattcagcaacatcacacatccctttaagcaatcaatgaaaatgctcattcagttttacccctcaaaatgtgctttagataagtgagtctaatggtatcaaataatgcctctgtggacaggcataagtgagattctggcaaaaaaaaaaaaatctaaaagttttttaaacttattgaatctgtcagtcttgctcaacttttttttgtagtattcatagtattttgaagagagtaggtccagctttgaaaaactctaaacttaaaaaaaaaaaaaaaaaaaggtggccaggtgaggtggctcatgcctgtaatcctagcactttggaatgctgaggtgggaggattgcttgagcccacaatttccagatcagcctgggcaacatagtgagtccctgtctgtacaaaaaatgaattaaaaaaatagctgggtgtggtggcatgtgcctgtaggcctagctacttgggaggctgagctgggaggattgcttgagcccaggagatggaagtggtagtgagcagcgatagcaccactgcactccagcctgggcaacagcaagaccctatttcaaaaaaacaaaacaaaacaaaacaaaagcaaaaaaagcatgagctttaaagtgaatggataggtagagagattgaggaattttttggtaactccttagctatattgcctttaaaaaaaaaagtgtgtatattactttcagcaaaattatttcagcaaataagtataacactgctcttgtttatattctttcaattgaacctcgctgcccaaccagtagtacatcctcagccttttttcctctccccagatagctcatcttcacgatccctagcacagcactaaatgcaaacaaaatgtccttacatgtgagtcaagtacagtttagtctggagaaaaggcccctgtgtctgaagctgttccttctatgagccaaacatcaagtgttcaagtcagagggactacacagaccaggacagggggctggcttccagggctgaggttgttgctgtaattgtttttgggtgtgcacctgcagcgcctgtgtaaaggtggagacagtggtgggaggagtgaaatctcccaccgtggttggatgctggacgaacggcctcaggtgtaggcagcttttttgttgttgtttttttgtttgttttgttttgttctgccatgcgcttcagtttggaagcagcctatattgtacacgttgattactttgaagaagtgatttcttattttgcttcatgttcattttcaaggaggtataccttggggagtgggagtgttttttgtttttgttttttttttaagcattgtttatagccacaatagaatgtcattggaaagagtggaggctttggaattacatttttatcccatactaactgggtgacctttgacaagatcgttaactcatactgagtggagttcctgtttcatgctgggaatcatgctgggacctcaaagacctcctgttctggagagagagatgctcatcgggggccagcagagccaagttcacaggacagagcagggatgccccagccagtctgcaagaattggaacagcttggtggaagagagacacagtccctcttagtcacagtctccttgtctggaagtaggggcaatggtaccgcagaggggtggtactgagtgctaagtaaaacgagttagaaatgcctttcacagagtctgatgaatgaacgtgggtccccatctttggtacctgaagacggccatgtcccacaggtgtgtggtcagagggtgcacagttcacagaaggcctccacagtgaggtgggatgcaggtggaaagagaagtcccaggaaaagggaggcaggggaggaaacagaaagctgcggttggaagaagacctcagcacaggtgcactttttctcttgtggattagttattaccggatgactttcatccacacacttaacactctctttgcagggacagttttggggaagggtaggcgtctgctttcacagaaggtaattaccgcaaaagctggtaccagctcatgctgttctgatgttttggttacgcaatcatgggcccctgtactagtacatttgtcttcataagctgtgctgaattattttttaaaaccgctaactgatgcgattagtaaaacattttggtttttaacttttgatgaaaatagcactgtttggaactgtgatgcaggggtttactgctgagtgaagttctagaattttgctgaaagtaacatgacctgctctgtgggtctcactctgtctctctgttaagattgttgagtgaatggaagaaaaggaagacttggtgtgtttccagtgatctataaagaaatgatgaagtgaatatgttctgtggatctctgttctctctttgactctattaaccaagtaatatcttaatttaaaatgatgaaatttaggaaattagacattgctattcatcttagaagggaacaaagtatccatgctggtctagtgaagccacatattaaatcctcttaaaacttaaactgtgccttttttccagatttgatctacgtgtggatattctaatgattgaatataataggattccattctttaatttcaaaacttttagaatacggagttagaatttatttatttatttatttatttatttatttatttatttattacctaaaacaagttcagtggaagatgctttttgattattatcacattttgggcttttgtttttggtaacatgcaggccatatatgaatgaaattttgctctttcacagaatgatatgagcatctgtttcttctaattagaatacatctacaggagaagagggattttaattttcatgttgtagcgaatgtctaagggttgaccgggtattttggaggagtagttgtactttgatcatatttgtatttgcttttctggtcaggagcctggataaggaagcgccccctaacgggtgggtggagcagagggagtggggcgagagatggagaggaggggccggggcaaggaaggatccctaggtctgccttcctgtccacagcactgcccgccagccacagctcctgagtcaaaggctctgaagcaaagttgtatgatgaaccttggatttcctgtacaatttggctaactctagggtgatctctaataaagacaaaggccaggggacagaaatatctttcttttgctcctggcaaatcccattttgattctatctcaatctaactgtccagaaaattggattgaaagcaggacaccgccgggaggtaaatcagattagggcttcctctaccacagcctccagcagacatttcattttgcagtgtgcgtccctcatttatatgaagccgtgtatggcccctccatgcagcagggtgcgtccaagctgacccagcgaaccaagacatcaggtgaccctccaatttgattcactgaaaatactgccggtggcttcattttctccagagaactgtctgcacctctgttcctttctttttatttgggtgcctatgatgacctcattgaagtcttcatctttttcttagccaatgtagcgtttgctaaggagccagacctcagataggaatggagagccccagaatccaggtgcagcacaggtgcttccagaaccttctatgtggtcccttcgggaaaggatcatctgtttttgtgaggcttaacaggaagacagaactagggaagaagcagggtgaggagggagaagtgcagctgtgtatagcgagaataaggatctgccgaaatttatcttggggtttttatttcctcttgaaatgttgtgcgttctgagaacctcgaggagtgtttttgttgcctgataggaactggcccggcttgttcctattgcactgaagccttcaggaatgcggcctctgcacctgtgatgaaaacaacatccaagaaacccaccagtgggttccagaacttcctttctacagtgactgtttgggtcacaaaacataactagacaaaaaattagctgggcgtggtggcgggtgcctgtagtcccagctactcaggaggctgaggcaggagaatggcatgaacctgggaggcggagcatgcagtgagccgagatggcaccactgcactccagcctggatgacagagcgagactccgtctcaaaaacaaacaaacaaaaaaacaaacaaaacacataactagaaattatgaggtttataagggctggtgtcttaaccgcaagtgcctgtttgaacccccattgagcttgtagcatcgagatgtgctgtgtgtcacattcagccacatttgtacagttggtggcatttaggagtcctgcctggaaggccaagaatatttttccccacagtggcttaggaaatggaactggagccctcattcccctcacttcccactggctaggtggtcacggatgtggaaatatcccaagcttgaaaccactgaagatggagctcctgacttggaacagaggctctggggtaaggcaggcattggggacttgagggaatcccaggaaaagactgggaactagaacccatgtgccctcgtacagatccacagtccccttgccttgggtcccgtgatcctttttttctttttttttttctttttttgagatagagtcttgctttgtcacccagactggagcgcagtggcttgatctcagctcactgcaacctccacctcctgggttcaagcgattctcctgcctcagcctcctaagtagctgagattacaggcgcccgccaccatgcccagctaattttttgtgttttcagtagaaacgtgtttcgccatgttgaccaggctggtctcgaactcctgacctcaggtgatccgcccacctcagcctcccaaagtgctgggattatagacgtgagccactgcgcccagcccccctgatctttagaactgccctgcttgcctccctttgcgccgccctcgtctgctgtaggtcgaattggtttaagagctgggcatccactggggagaaaaatcagagtagggcttcctgggactcttctgggttgttctgactaacattgggttttactcaaattttctctccctgatgtaaacacgcagatattttttaaggttttaagtgtgaccatttagcttacatgcaagtcagaatactttgggttttttcagatccaatagcaggagcatccaggcttttaaagctgtgggatatgatttctgtgtatttgggctaaattaatttgtttattgataacctcagttgttatcatgctaaactgtcagaattggatgtgaagccagtgcttatgtagactttatttatgtctggcttctttctgaaaacaattcctcctcatgccctagtttcatgttgtgattttagcagaattaatctgaaatgactcaaaattatacaattaattgcattcagcttcaattacagtctgctggatgaaccaagcccactgccctctctgggcagtcacttgcatgtggcagctttgtaggtgctaaggccctgtggactccctggtcagtgtgctggcttcctggggaaagcattttggggttgacagtcccaggggcctaatgcctcagttgcagacaaatgcaggctggacctggggctgcaaaaatgccaggtaacagcaaagaccatggaggtgagtgtcatggaatttgggataaatgataaaacattcttttcttttttagtagaaaacccagatttgggtgtttagggttggagaaggcaggatctgggtaggtgtattagtctgttttcatgctactgataaagacatacccgaaactgggcaatttacaaaagaaagaggtttaatggactcacagttccatgtgtctggggaggcctcacaatcatggcggaaggtgaaaggcacatccacatggcagcagacaagagtaagagccaagcgaaacaagtttccctttctaaaaccatcagatctcatgagacttcttcactactacgagaacagtccaccatgattcaattaataactcccactggctccctcccccaatgtgtaggaatttacgggaggtacaattcgagatgagatttgggtggagacacagctaaaccgtatcagtaggtttaaggtttggaaggtggccagccccagggcagagaagcttctactggagattccttcctttctcctttttactctgtgcaattgtgggccctggggtgagccaggtgagggcaggtgcctgaccacaggatggaagggccggcagatggcggacccaggcagcagtggagggaaggtgggggttgaggggatgcagagggctgagagaaactggggatggagggaactgtggtcgacgcagctataggtctggacttatttttcccagatgaggaatatctttaagtccacataagtgagtcagggactgcttgtattcaacttgtgctcctttgaaatgttcttattctccccacgaactgactttcattcacaccgtctatttggcaatacatgaccgaatttggagcctagttctttttggcaagaaaagttcattaattttagtcggctccccacacacttcacaaatgtgcttgaaaaaataaagggcctcttatcgccacacagctgccacgaaattgccaggagtgctgagtgctcacatatagaagacggccatttatgttgatgctgtgagaagaaaaggtcccccgaagcactttgaactggagctgccaggaaaatgatggtaaatgcagaagcatcagcgaagccataggctttatgatcatttatcattccaaatttctaaggattatcttcatctcttttattctgtaaacactgattaacttttaaaggtgatggaagtctggctgagtcaaacttactcatccatcaacttagtggacttggagaaaaggccctgctgtgacattttgattaactgggatcttacctgtgtggggttttctttccacttaatatctaagaacacaagggtgggaagaaacttcagtgcctgcctgccttctgctcttttcctcatctgtaaatgaacatctgagaagggagtgagacgttcatatcagcctgtgcagtaggcctagctacactcatttatttgctctctcttttctgatttctctctgtactgggctgaacaatgttccctcaaaattcatgctcgtccagaacctcacaatgtcaccttatttgcaaatagggtctctgcagatgtaaatagttaaggtggtggtagattagggtagacactaaatccattgactgttgttctcgtaagaaggccaggtgaagacacagagacacacaggaggaaggccacgagatactggaggcagagattggaacgatgcatctacaaaccgaggaatgccaagatttgccaggagccaccaggaactaggagtgaaagatgaggaacagattctttctcagagcttccagaaggaaccagccccatcaatgccttgattccagacttttgtcctccagtagcaattctgagaatagattcctgttctgagttacccagcttgtggtactttgctggggcaaccctaggaaatgaataaactcattgtacttctgaggtgtctttgttctctttttaataccaggtatatactgctgctcattctaaatttcctcttgtccaacccaagtttaagagccgtaagtggcctattctaagttttcttcccatccaaggctctataagaggccattgccccaaaccaagggtttggaatagtcaaagatcctgcccagatgtgatgcccaggtgttctcagccgtgggtttggggatgatagatctctaaaactctcgaacatctagactttaaaattgtcatcccctgtgctggcttccaaccacaggttctgtgctgcttccagctcccttctctgctgttggagattatttggggactgactgcgaggcaagtgaatgaaatagatggcagaaaagacaaaggccaaaaaatccgctgcacctactggcttcccagatggtgtccaagggatgaaatagcttgagccctgggccacaccatatttctgtcctgactgtagctgttttgctaaggagcccgtactagccttggaggaacagctttcgatgctgcaaggaaagcacagagtggggatagctgatgggagttgtttcagtggtttaggctgacttggtgattctaggtatgccttaggccagtggctgctgcttcttctgtacatgaatgtcatgaatgtctgagtagggagtgagaggttcatgtaaaccttttatgttgtaggcccagctgtgtggccatgggagggtgcttggcatgattaggatggaaaacttttttgcctacactgatcatgccagagcgatttaatatttcaataagaatttaagggatagactcatcttggagtcgtcgtcttggcctgttttctcaccagtgttttgggtgtttgtccaagagaacttaagagttcttaactgagtattttgggcctgtgggggtcaggagaacagcatgttttacctctactgaaggtaggagctaccttggcatttggggtgaagagatgtgtggggtttcttagtgtaggggatggtcgtggagcctgggagacctagatggctcagttcttctaatttgttgagccttggtgcatccctctcttggggtgatgataatggtgccacctcagagggctgttgaagatgtgagatgcatatagaacacagcatctggctcgctgtgagctctctggagaggttagccattgagatggtttggctgtgtccccacccaaatctcatcttgaactgtagttcccataatccccatgtggaagggacctggtgggaggtagttgaatcatgggggtagttacctccatgctgttctcgtgatagtgagttctcatgagatttgatggttctataaggggcctttcccaccctttgctctgcacttctccttgctgccagcatgtgaagaaggacatgtttgcttctccttccatcatgattgtaagtttcctgaggcctcctcagccctgcggaactgtgagtcaattaaacctcttcttttataaatgacccagtcttaggtatgtcttttttagcagcatgagaacggactactacagccatgatcactagctgagtgtgctgctggggtcacctgctgtactcctgcagacctcaatctttacagagtagaaaaatgaagcctgatatcctcatgggctctttttgtatatcagaatctccgtcatctcccacccaccaaattggtttggagcaagcaacctgacataaggagtatgaccttcacaaagtcatgttgtgtaagtagcagtttcccaaactaggcagtgtaagtgagagctctaaaccacttagtggatgagggtatactgattttaatttttaaaagttgagttattattggaacatgaaagaaagcctatttcgcagaatcagccagtgaggcattccttcttttgtcaggatcttgtagttgctatgtcaattaatctgctttctatttaggccattgaaataaagttatatctaaaaccttgaagtaaggtacaaaaagtctacagcttcctggaacacagcctagacgctggagttaaacaaaaatggacacaggggtcttaagaccccccagtagaatatgcaacactgctagggtgccttgaagatcctttcaggtttgtcttcttttttatctctttattttcctttttttttttgagacggggtttctattctgtcgcccaggctggagtgtagtggtgcactctcagctcactacaacctccacttcctgggctcaagcaatcctcttgcttcagcctcccaagtagctgagactacaggcatgcaccaccacgcccagctaatttttgtatttttagtagaggtggggtttcaccatgttggccaggttggtctcaaactcctgagctcaggtggtccgcccacctcagcctcctaaactgctgggattacaggcgtgagccaccgtgccctgcccctttcagaatcttctgagaattgtcttactgtaatattccttacacatttggttaccgaccttcccagtacgtcattggagaaagcaaaggcaaaagggggaaggagagaagtaacatttgttaaatgctaactgtgtgccaaccacttgacatggtgcatgttatccccattttacagatgggaacgtagaggctgagggaggtaaagtaacttgattaagtttaccctgctatgaagtaatggagttgggatttgaaccactaaggaacacactcaggtattgttaagtaaaaaaaaaagggataatgattgagcacactggcttacgcctgtaatcctaacactttgggagattgaggtgggtggattgcttcagcccaggagttcaagtccagcctgggccatctggcaaatccctgtctcaaaaaaaaaaaaaaaaatacaaaaattagctggaggtggtggtacacacctgtagtcccagctactcaggaggctgaggcaggaggatcaattgagcctgggaagttgaggctgcacggagccatgatcatgttattgcactccagcctggatgacggaactacgataacaacaacaaaacaaaacacatgatgaatacgcactgaaagatcaaattagattctctacctccgttgaagaaggtaaaaaagtatatagtagaatccctcagaaatatgaatggttagaattatttttaaagttttgtaaatgtggggcaaatttctattttctggaaaattcttctggtggaacaccttgctctctaaaagtgccagataaatgagattccgcttgatttgagagctaagttctatgtccagttcttccttgctgttattaagcagcaaagagagacccatggttgcacactgggaggcttttctctttatcgttactgtgtttatagacccgactccatcgggggtgcttttaagtaagtaattattttggggcattgttgctctttttcgttcagtgcgtaagtatcactctctactgctttctgatctttttacttttatttttatttttattttttagtacttccaagtgagaagggatgtggcctcccagctggtgtttgtcagggttacatggtacatgtgcaggaagggccacatcagcaggccttgagtaatccatccgcagtctcgaaggatgaatcattcatgaaagcagttttccatcccgctcactggatgcaagcctttcttgcaaagttgatttcttttgcaaaattaacctttgctttctgctccttgcccacacagcttttgaaataggaagcccacagagttgtgttgtttttttctaagtaagtctaacggactgggcatttgtaacttcaattattacgcaaggtattgaattccgcctatgaaatctatgaaggtcattgcccgtggacttagaagtgcctagcagagttgaatggtatgtgggctgtgtgtgtatgatccatatggctgaagtcgtggttcttactattactatatgattatgtatattttaaaaatagctccttcagattttaactagttttaaaactcaaagtatgtgaaagggtttgcatttgatagaggggggaaaaggcatacttaatatccagggttgataagcgaaggcgtgccacctcctgtaagtccacccctttcatcctttacccccatttctcacactacttttttggtgttttgtgcgtttttattttttccgaattgcagcagtgcagacagggagaagaactaaaatcactctatagctggcctctgctgctcattacgttttagtgggataaaaccttgtcttgccctcctagttggagaaccagctgaattgcacctttgaatgttgctgggttttgtgccaacctgccagctgatggggcagaccagcagcttagtgtctcctttgctgtggaagcagaactgcgtccccattatttgacaggcaggaaacggtaaggctagcaaagcggggactgaagacttcaggtgtcccagctcctaccccagaggttggtcgcagacacaggtttataaaacatcagtatgtggagccaccttctctgaggttgtcttgttgtgtctgtttcttccttagaaaagcacatcccagatgggcatgatggctcacgcctgtaatcccagcactttgggaggttgaggcgggtggatcatttgagcccaggagttggagaccagcctgggcgacaaggcaaaaccccatctctacaaaaaatacaaagattagccgggtgtgatagtacacgcctgtagttccagctactcaggggaatgaggcaggagaattgcttgagcccaggaattcgaggctgcggtacgctatgttcacgtcactgcactccaggctgggtgaaaaaatgagaccccatctcaaaaaaaaaaaaaaaaaagaaaagaaaatcacatcccaatcctaatacttttaaaagttcatgtgccaaatttaatattcaagttgctaacatgttatctgtatgtaaaaaaacctgttcttctaaccagacttcttccagacttgttttgatcagtctcaaccagcatatgtcattggcacatttaagcacaggtatgtaatttttagcaatagtgagatgttctatagtggagtgcccgtgtcacctgagttgtggtgaacagtttcaaatatccttcattttccagtattcaaaaatgaggaaatgacctcagatttcagtgctatgataattcccctagttatctcctaattctgtgcttattttgtgttgcagcaagtgaagctcagagagctcgcgtgctaggtaggcactaagtggtaaaaatgatgtaacattttctggggaaatgtatccaaagatcaatttgtaatagaaaaacagtattcactgggcacttaggtttatattatgatagcagatacttgagaaccttcttggcatagaggcattctgtgggtttcatggtggcccatgagttaattggcagctggagtgtgaagtaattgaaataattgacccctgagataatgggtgtataggcactggggttcctaactatcgaggaggagactggggttcctaactaccgaggaggagactggggttcctaactaccgaggaggagactggggttcctaactaccgagcatgcttctatgggatgtcattgaggtgtttcctgtttccgtgaacagtgtctagttttttcttttttgaccctctattttcatcacttctaagatgagaccttggttgtgggcagagggtgtgtgatatattcttttaaacgtcgggtctgcttccctctgtttgaactcaagttggacagacaaatcccttcatggatggaagctggctggtgctctgcggtttctgagatcagtgcacaaggccaaacccagtttgtcaataacagcttcttcctcattgttttatgtttctaatgaaacagctcctattttgtagtacacaaaggggaaatgtgaggctggaaagcaacataggattcttcattccagacagcagccagtgggcccgctcatgaaaagttgatggttgtgcttaatgagagaagaaaaaaggcatctaatagctaaagtttgccttaacataataattacttcccatgtagcagttccatttttctaatacttgaatgtcttattgtataagaaagcaaggtacttatttatttttacaaccttacatctagtttctgtgaacgttttcattgtataaatttgtttctttctcaaaatagataaaagacaccaaccatcttttttaatctactgaagcacatgaatagtgcttatgtccattttaggatacttttttgtaagccatgatataggtcttccccaccaatggtggcagcttctttagaggcaatttacaaaaacacgaacacccctacctcccacctatggtttttgctttctataaaaatgttgaatatgtcatagctaagaggaatgaaatgtcctcctgcagagaataagaatctcttattaaaagtagcccagaagtttactgttggtgcttagaaaataattgaaggatgtggaagaagaattacaaagacatgcacacacatgcacgtgcacacatgcaaacacacacacacacacacacacacacacacacacacacacatttatgagtcactgactggcaatcataataaattatttccccagaatcaattgtaagcctgcagactccagagaggttggcttacccggcctggagcagtgctgggtggagttgtttactctcctgtggcagccttagggctcttgaggtatatgtgcgctcttagtcctctgttatcttctgtcaccgggagacaggcaacatgtgcaccagaaactgctgccatgcctgtcgccctgtataatgtgcagtttttgctgacttttctctgaaaccgtaagaaaagatctagtgactagctgagtcacttgaactatgtgagttaagtcacttgaactacacgagttaactgagcaaacttgcagctacccaggaatttgattttgtatggtgaaattcttagccttgattctgtgtttttttttttttaaatttttttatttttttgagacgaagttttgctctgtcgcccaagctggagtgcagtggcatgatctcggctcactgcaacctccgcctcccaagctcaagcgattctcctgcctcagcctcccaagtagctgagattacaggcatgtgccaccatgcccagctaattttttgtatttttagtagagatggggtttcaccatgttagccaggttggtctcgatctcctgacctcatgatctgcctgccttggcctcccaaagtgctgggattgcaggcatgagccactgtgcccagctagtttgtttgttttgtttttttaatttattttttagagcagttttaggttcccagcaaaactgagcagaagatacagagatttcccatgtacctcatttctctgtgcctgcacagcatccccactgtcatcatccctcaccagagtggtccattcattgcagttgattaagctgcattgacattattatcacccaaagtccacagtttatggaagagttcattcttggtgtatcttctgtgagttgtgacaaatgtatcatcatatacagctactattctagtatcatgcaaggtatattttcactgccctaaagatcttctatgctccaccaatagaagatccctttttcttccaacccttagcatccattgatccttctattgtctccatggttttgcctttttcaggatgtcatgtatttggaatcctgcagcatgtaaccttttcagattggcttcttacacttagcaatatgcatttatgttttttctatgtcttttcgtggctggatggctcatttctgtttagtgctaaataagattctatcatctggatgcaccgcagtttatccattcacctactgaagggcgtctgggttgctttcaagtttggggcaattatgaagaaggctgccataaacatccgtgtgcaggttttcatacattttaaactcatttgggtaaatatatgacccactgcaattgtggggtaaaatggaaagaatatgtttagttttttaagaaactgccaaactgtcttccaaagtggctgtaccattttgcttgccctccagcaatgaatgagagatctcattggtccacatccttgtcagcgtttggtgttgtcagtgttttggattttggccattctaataggtgtgtagtggtatctcattgctttaatttgcagatccctaatgacatattatattgagcatcttttcacatgcatatttgccatctgtacatcttctttggtgagatatctggtcttgtgcccatttttaattgggctgtttgttttcctattgctgaattttaagagttatttgtatattttgtataatacttctttatcagatttattttttgcaatattttctcccagcctataatatcttctgattcttttgacagtgtcttttgcagagcagaagtttttaattataatgaaatccagcttaccaattattttttcatggattgctcctttggcctttggtattgtatctaaaacgttattgccaaacccaaggtcatctagatctttctcctttgttattttgtagagttttacaattttgtgttttggtttttttaattaaatacaaagggattggtggtttttgtttcttggtagaaacatagtttgtttctttaccagtgacataagcaataacttaagtaaataaatgaatgactaggaaactctttgactaggccaacccccatagccttaataaccacaacttaacatttgcagaataggaaggactaatcctttaatttatcttttatgtctatccagaactttagtcctatgagctgttttgtaaacgagatttgttttgtgggaaagggaattttgtttcaagacttccctaagaaactgatagcatcgggtaattcttaaatttgacttatcataatggtatatctggaaggaatttgtcaactgatatgttataattattttttaattttttttaatttttgagataggtcttactctcttgcccagactggagtgcagtggtgtgatcatggttcacagcagcctcaaactcctgggctcaagagatcctcccacctcagtctcctgagtagctgggactaaaggcatgtgccaccatgcctggctagttaatttttttttttttttaagtagagatgaagtcttgctgtgttgtccaagctggtctcacactcctgagcttgagcagtcctcccaccttggcccctcaaaagtgttgagattacagaggggagccactgtgcctggcctgatatgttttaattctaacagtagatctgcatagagagaaaagttggtattatgaacaaaggtagctttaattcgaagagacaaccatccccattccacaacctctttccacccaagcaaggaaatttattgaggccagtaacattttaaatgctttttggagttgtttatttgcatgtactttctttcttattgtgtaagatttgacttttttttttaaaggagtttcttcacatggataactcagtttgtatagcctaatgtaatctcagcaataagtcaaaagctgttcttctgtagggctatatagttctctgacataggaaatcattcttagttccattatattgagaagaaacagagaagcattttacatccaagtgcaccagcagctgttttgttacatagctgctgtgtgcagagcccaatactgagaattttaagaagtcactgaaatatgtcgaagcacgaggatgggtctggatctcctcactctagacgcctgtaccttttttctgtagtcggtgaatgaaattttggaacatgaactgcacgtgtggaaagaatttgtgtgtgggtggaggaagcatctaatgggaactgagctgggggaagtagagcttggtcccaggtgtcccagctggaagagtttgaagccagacccagggagccctgcgtttgaggccacctgcactgctcacaagccacgggccttgggaagccctttctgggaacttgcttgtggagctgagatgggggtcagaattattctgcaaagtggttcccactgagcaacaagtgactttctcttcctccacgttttcttctccttacctcaaaatggaagaaacttcttggcaaaataccatttaacataatttggccacactgaacatttaaaaataatcaaagatggagtctgtgctgttaagaattgataagtattccacataaaatctaaacatcgttcttttctttattaaatttttggtgtaatgcacaaaaacttgaaacttcagcttttaataaaattgactttatttctaaagagaagtgggaataacagtggtgctaagattagcagtaaaagcctttaacctgcgaattccttcacgctggggtcaaagaagggaagtccacgtggatgtttgacttgtgacctcttccttcatttaaaaaaaaaaaagacttaaattactcatgccctcagtttaaatttgtgactggcatttgaaactatggaatgattcacttttccttgtagcaagaaaatttgaaaatgaaagcaaaatgatgctcatattcaaactgaacctactatgaaaagatgtttgctgatggcttcgttgccctgcaaacacacacgacagagatggctgttgttcaacacattattttcctcttcctctgagcatcttagagagggatgactgtgcatgttgcctcatgcgcaggaggtggtgtgcaaagatcttttggtttgtatcgtggcttacaggctctcatttaggccatggcatggtacattccaataccatgagtggttaaatctcaggaattccaaagtgtatgaacggagtgatgtcagctgtactctcatttcatgctatgtagccagatgtcgtgtagctaacctcagcagttactatacataatgtgctataactggctgatttaaggtaaactgcctcagtttcctcatctgtaaatgatggcttttgactaaataatagcttagttttcattgtgaacaaaatgcttgtttagctgggcaaacacatttttttttgcagaaaaacagccctatcaccaatagtacctgctctagtgcttttaaaaattagaatgaaattttgtttgtacatttttgtttgtttttgacagtctcactgtgtcacccaggctggagtgcagtggcaccatcttggctcaccacagcctcaaactcctgggctcaagcgatcctcctgcttcaacctcctgagtagctgggaccacaggtgcatgctagtatgcctagctaattttttaattttttgtggagatggggtctcactatgttgctcaggcttgtcttgaacttctgggctcaagcgatccccacgccttggccttccaaagtgctaggattacaggtatgagccactgcgtctggccttggttgtacttaaaaaacaaaaacaaaaaattaaaaaaaaaaacaacagaaaacttttcatggctcccaggagcatttatatgactaacaagttatctttccttgctgatagttccactttcctcgtgtttgacagaaatgactcttagtttaggaactcctcattagctgtttccaggagcagtggggtatcattttgatgcttctttatttcttctatgcaactaaaatacaaagtgaagatacgatgtctctgaaatgataaagctacatttgtcaaaaagcacatattttccattcgacattttggcttaaagaaatgaaaactacagaatgactttttcctttatctgggtctgtgctgtgtatttacctatttaaaaagatatacaggtgaaaaatattttttgaaatgaacttgtctgaatcaagatgcacactcttgcagcaacatcacagggtgtctctgtcactgaggactctgtcctcatttgtgtgggctgactgggtcgctggctgtgggaggcacacatttgctatcttggtgcagcagtttgtagtcagctgactgacttgttcctgcacatgcattttttttcctggcaagtcataattcatgtttttcctaaggtccaaccctattataactgacagatcctatctggctgagaaacatgggcacccttctgtttttgcctcttgttcccaacatatttgtatgcttttcaataggaagctgacctggagtaaatgcccagggttgtctgaggtctctaaatggaaggtgtggtctgaaaccagctaactatggcagcattagggcaagagcgcacaggtaaaggacttctgaaggagggtggagggtgggaaagtgggaggggcgagagctaacatgaatgaaactgaagagaaacagaagttgtggctggcatgcaggagaaacccagattcccattcaccacttcctctcacctccagaaattacccatcattcctctctattttgcaatcctctctatttcccctgaaggttctgctttgaatgctgtcttcccagcagaaatgttgaagggaagtagctcagcccagttcccttctgggccaccactttcaactgtagactttctagtcagagccaagaaggccatggactctgagaatggcatttaaagtctctgccgggctccacttagttccccttcccctacagatgccttattccctcgaaatgcaaacgaggctccatggccacagtttccttcctctttctgtccacattccagtcgttcaccatctcgagaacactggggcaccctcctctacccccagccagagctgtcatttagttgtgatccacaaatctgctaaagagaaaggtgccctgctatcattttgcaaaggcttgcttggaacacattcctgccattcttttttgctgctctgtagcctgagtgattatttgtttagtgtaggagtaaatatgaggggtgctgtgtttcttaaaaacaaaacaaaacaaaacttttagtgacatatgctcattgggggaaataagatagaaataaataatattgaaaacaaacacccgtcaatcacgtgacaaccacaatatagcactttggtgaaaatggtcttaatttaaaaaagaaagtccatctttctaggtatctgagcaattcattactattctatgtaatttttgtgggtttataattaattttgtagattgggatttactagcatgtgataccttgtaaaggacattttacattaaattatcttcctccctagcacattgcctaattctgtcacttgtattattgaggaaacatttgcaagtaggacaaaaagctgtctgcaaatacttaagctttgagttgtttttttctgaagtgcgaacacaatcaattgggttaagtctcccagcccctaagtgggggtatttatgttttttttaggagagaaactttggaagtaaatcagaagtacccagggccaatggccagagtcttagaggaaacataaacctctaggatccagtgagtatccacaaacttagagcactgcgaaggaaacagttgggttagcgttttattaggaaggtcagagatgatttagaaagttaacccttccaaggggtaattacccccaatatgtgtccgttgtggcatgctgtgtacattcactacttttttttttagtgggaaaataacaacatgacttggctgcatgtcccaggaagaggccacagaaatgaaacctcagggtcacatgaaggagattcccctgacatatttcagagctgatgcttaatggacctgaaccagtttgcttttttttttttttttttttttaaaagacagagttttgctctttggcccaggctggagtcaagtggcacaatctcggttcactgtaacctctgccaccccccctccccaacccccacccccgccaacctggttcaagcgattctcctgcctcagcctctcacgtagctgggattacaggcaccccccgccaccatgcccgtctatttttgtatttttagtagaaacggggtttcaccatgttggccaggctggtctcgaactcctgacctcaggtgatccacccgcctcggcctcccaaagtgctgggattacaggcttgagtcaccgcgcccggccccagtttgcattttttacagggcagagactgaagggcacttagagctacctggcccggcctggctttagggacctgatctgtgcagatatggtaattccccacgtgtcaatgcagttcagacttaaagggcacagtcagcccttcgtttcaataccaagaattgcccttttgaaagggtcttgaaggacttgacattctaggatttaattattagggggacgagcagaggcaatgagatgcaactctgaaacaaatgtttaaccacttgagtcaaagaggaaacagagtgaattaaaacttgaaaagtgatcttcaaatcggcttccgcccttgtaggctgattagacgacaactagcatctccaactaagagtgtgtataattagaaagccctctaggttatatctcaagtgagaaaagaaatatgcccttttcttagcctttccttatttttggcctgtatttgggaacttttttttttttttagtttagttttttttttaattgtacttctacaaagtgctctgcaagttgcatgagaatacatacaagagctttagcttcatttaggacatattctctcattcctgaaacttcagattaatttagcatttgatgacctaatattgcatttcctcaattttgttctataagtagcattcatcagagcaaagtttattttatgttggtggcattcagtaagtgatacatcacaaagaaagattggatactcttgcatatcaaatatactttgaactgtgttctctggcaatgccatagattttaactgcaactgacaacttgtacttctaagagagcatttatcattgttggatgtgcgttgtgtctgtctgctaattagcttgtgaagtccctcaggttattcatctcatagaggccagtgtctggcacagaataggtaaccactgaaggtatcctgagtggaattgagttgcaacagtgtgttatagacagtatagtccacaaggaaaagtagtcatcactgagcagaactgcattttgcagccctccatgattttaggggagagcaaatgtaaaacacattttcaaacaggtgagtctgactaatttggaaaattgaatggactgttttctaattttttttttttttttttgcatctgggatataaagcaacagtgaaagttactttttaaaaatgggctgaagagtgagaaatgaatctgacttatcaaatccgcagagggttacctttattactgtgctgcccttcatcccatgcctgcctgctttcatgacaagttgcagtgaagtcgtatttggctgtgagaagtgacttgccttcagggtcactgtgaaccatgtgggtggggccgggcaaatgcatatttaagtactataaaatatttagaagcagaagattcaaaatttgaccaatcagtttgatcaagtttaatttctttttgtttttaaggacatggtttcgctgtgttgcccgggcaggaatgcagtggctccatcatagatcactgcagcctggaactcctgggctcaagcagtcctttcctgcctcagccttcagagtagctaggattacaggcttgcaccactgcacctggctaattttttaaatttctgcaaagatgaagtcttgctatgttgcccaggagtggtcctctggcttcagcctcccaaagtgctgggattacaggcgtggaccatcacacatagcctaagttttactataaccaatgaggcaacctccatggagaccaagaagagggagtggtaccttctagacatcttgacctttgtcttctggttccaggagctgctatcgctaggaaaaggaagtcctgtctgctcacagcccacccgcctctgcacaggtgtccctgggttggctcgttgatggtagtggtggaaattgtctcagtcattacttacagcctgtgaatcctattagcatttctccaattttctctgtttttatcaagggaacagaaatccatcatcaggtatttccacaaaattgacctcatagttccttcctgggtttaatgctcagttgccaaaatagaagtgaagagtcagcagagttgatgtgaagtcacttggagtgaatatcttcaaattaacaagacgtaacatccctttcctgcctttagcccacaaatgcccacctctgctgagccaccttcttgcaaaggaggcttttggaaaagatcttttgggattatgtgaggatcccacatataaagtagcaggagaatctcgagttccatgggaaatgactataggtcatttttccattttcagagaaatcagtgcctttgaaagagaccatagctttttttgcctccgaccgaacttgcctaatttgtggaggtgaatgaggcagcctttgttctctgccagactttagtcagagcccttaagcatggcttgttgtccagagcatggtagagaaatttagagcatcatcgtaactgtagcaccaccaaaaataataaccacaggagctaccattatggaggaattgccccatgccctgcagccacctctcctcctccactcccccactcccccattcccccattcctccttcttctcctgctccagtattgcatatttttacctgactctgcagcgggctgcctcccccggtagctcactcctttgacctagactttgggtctttgtagctctggtgcttgtacctgctccctctgccctgggccaggattctcagtctctgggattggcctcaatctctgtgtttccccagtaccttgcttaccccttcacatgcatgtggattgcacggactcgccctggcttgctcacatgaaacactctcctacccatctcttcctttcagctggagccgctgtgcccatttcagactctgccttcacacctggactccagcccttcccttgtaacagcctcccttcaggaagagggtgtcttgcagcctagaccctcagttaccagagtccctcagaacagcctttcccattctactgttgttcaagtgtgttggtagagaaaatgagagcatcatgataactgcggcaccatccaaaatgataactgcagtagctactattaaggagtatagtgtctagcagctagtgttttggtagaaactcaagccaacacccctgtaatcccagcactttgggaggccgaggtgggtgaatcacctgaggtcaggagttcaagaccagcctgaccaacatggtgaaaccccgtctctactaaaaatacaaaatcagctgggcatggtggcacatgcctgtaatcctagctactcgggaggctgaggcaggagaatcgcttgaaccaggaaggcagaggttgcggtgagccgagatcacgccattgcactccagtctggttctgggcaacaagagtgaaactccatctcaaaaaaaaacaaaaaagctcaagccagaccgtcaggattcaagctcagtctcacacatatgaactgtgtgactttgcaatttactacttcttgccacatcactctttctcatccttaataaataaaatcatttatgaagaagattattaataccatcagtattatgaagactattactcttatcgttgatccttattttctcatgggacctatcaagttcaagtgacctaacattatacaatttaacctattcttctgcagcaacacacccagatggggaggaacccaataacaccgatggtgctattgacatgctcagaactttccagtgacattgtctctgttttcttgtatatgtgcatgcatgaacaagagctttaaaaattgatggggaccctgggctgctggctaaggagctctcctgcctgatgcccagacaatgttgtatctatatacatttgctgggaagaggagtcagcctagctggaaggctgctattgttatgcaaattggaaaagcacacttttaagctacactcttgcaaaatggctgagggtggcagtgtgcttagggctccagaagagtttaatcattgtaatgaatccaatggaaaaggaccaagtttgctgcttcaagatccatattccaccttcagctgtaaaatgtgctgcagatattgcacttgcctgaaataaagcgctctctgtcttttcttcttctgaagaatcctttggctgtgttttattataccggaagcccatttcctcaacttaaagtaattattaacaacaactaaagctttttctcaatgtggttgaattcggtagttttaggattcaggatggatgtagaaaaaggtttgtgtgttgcgcgtaacctcggtcgtgtagagtatgtggatgctttcaccagtattcacatggagcagttatgcaggatctgcagcagcaacagctctggtgaccactcagtcctctcttctccatttccaggtagaccttacatctttctctctgaaagtgagctgaaatctgataccctgtaacctccaccctttgtttctgcaggatttccatccttcagggacaaacagaacaagcttaatccttctggcaaatatcaggtcttcaggtatttgcagacagctaagttgcaagctgtcttccctttcaggtgaatcccctactcctcttaggaagtggtttccagtttcattctcttgttggaaaacttatgccagagagaggctgcaaccacaacagtgagggcttggaaccctgaaccgtgtctcaggaggagtgaataaagatttgttgtatggaactctcacctcctccatcctagataatatacctctgttaatgcagtctcttctcctagtagctcttttggcagccatggcacctcattaatgtgtttgttaaaatgcctcagtcttttcatctgtggtgctgtcgatctgcatttctgtagttttgaagctaggtatggggattttcgaatgatccttattactcagtggagtcttgatcgctattagcttggtccagttttggattttcctgttggtttctaatttagccatgcaggatgtgtactgtctttcccagcttcccatttcccatttgagacatttgccttgtgtgagttcggcatcgaggtatggaaaatgaagcctcatagcagcctgttacctctcctaaaccaatccccctgtcagctcacatttaatgcggataccttttatcttgggtacttgtcagaaggtcttcttgatacctgtgtcttacagatacagctaattgcacattgtaggaactgattaatgcccaggggactgagtgccatcacacataattgtggaacgagagattttgattgcagtcaatgaagattttcctccctaattgtgaggggtcctttttaaatactattatacctgattttcttcttattttttagtttttattttttgagatggagtcttgctctgtcgcccaggctggaacacagtggtgcgatctctgctcacttgcaacctctgcctcccaggttcaagtgattctcatgcttcagcctcccaagtagttgggattacacgtgcctgccaccaggcctggctaatttttttgtatttttagtagaggcagagttttgctatgttggctaggctggtcttgaactcctgacctcaagtgattcgcctgcctcggcctcccacagtgctgggattacaggtgtgagtcaccatgcccagccaattttcttctactcttggactggaaggggctctggtttctgctaccttttctacctttagatgtacgtggtcacactttgagggccttcagttggtgttgaagaggagatggcgggcccaagctctgcaagcctggtgcttgggggcatgttgcctccctgctgcacagcacttcctgccactgtcctggtcaagctgggtttcccgatttacggaagagcttgggctcagagggaggccgtgaggagccccgagagaatgccagccaaggccctgtctggtctaatcctgccagagcctggcctttgggtggaactgggagggccggggaagaaggttatgagaggcacaagctctggttctctgccattacctctcagcctagaagtggccattggatttctttgtatgttttctctttatagtaaataaagaggaaacttctcccctcactggcctgtgtaggctacagttgcctgaggctcaggcttgcctgttcttctaatcattgaccttcttgttagttggattctctttttcttcatttaaaaatacgccacatttcctttccctcagtcttgttgcaagttcccaataattttggagtcctgttaaaagacctgtactttttataaatttgctttcccttcaatctggagaaagagaagaggaattacttgtagagtgggtactgtgtctcagagctaggctgaagcttcacgtacatcatcctgtctgtccttaacaatcctgcaaggctggtgatgctaatttccattttagagtcggaaacagttgagaatgagagcttcacatacccaaggtcatgcagctggagaataggggtgtgcagatgaggacacagggcactgtcccacccaccctaccaggacgaggggcttcatgctaaactctggcccattagaaaccacttgggaaacataaatgcccacggatacagccatttcaaagatccatgcttagaccagaacatttagcacaaagcgaaacccacagaaacttcaaaaggaataaaaatatcatgttaatgttaagaaaaattatttaaaatttggaaataaggcataaacgtaacagcagcatgtagttcttcaaatgttagccaggggcgttgcttaacaagcctacccaagggttatttgtttagggtgtcatacctggctttgtttttaacttttaaaaaataacaactttgtggccgagcgcggtggctcatacctgtaatcccagcactttgggagactgaggcgggcggaccacctgaagtcaggagtttgagacaagcctggccaacacggtgaaaccccgtctctactaaaaatacaaaaattagccgagcgtggtggcgggcacctgtagtcctagctacttgggaggctgaggcaggagaattgcttgaacctgggagacggaggttgtggtgagctgagattgcaccactgcactccagcctgggcaacagagtgagactccgtctcaaaacaaaaaacaaacacagctttgtaatataattcacgtaatgtacaattcacccatttaaagtgtacacttcaggggtttctagtaatttcagagttgtgtaaccatcggcacagtcctttttagaacattctcattgccccagaaagaaacctgttagcagttactccccattctctaactgggcagacttctttcggatgtatttattggtggactctaattcttgtttgacctagctttaccaacttagttgttccctctctaaaccaaaaagtacccgaaacgtgtctcaatcaatttagaagtttattttgccaaggttaaggacgtgcgcccaggagacaggtctgtgcttttcgccaaagatgattttgagtgcttcaatgtttaaaggggaaggaggaagaaattgtaaaaggtgttggtagataagaggcagagagttgcattcttttcagtttttcatcagctgttcacatgtgagagggagtagaggaatagtcacttgtgcattcctctagctccgtgaatctgctttttttgtttgtttattttattttatttttttgagatggagtttcactcttgttgcccagactggagtgcagtggcacaatcgcagctcaccgcaatctccgccttctgggttcaagtgattctcctgcctcagcctcccgagttgctgagattacagccatgtgccaccacacctggctaattttgtatttttagtagagacggggtttcaccatgttggtcaggctggtcttgaactcctgacctcaggtgatccacccaccttggccttctgaagtgttgggattacaggcatggaccaccgcgcccagcccatattcaacttattttttaaatgataattcataaaacactttaggatcttgcattgcaatagcattgttatgaacattgctctaaagttaagatttttagtttcttaagtaatacattaatggttgaaaaaattagagaatatagatgaacaaaaataaaagtaaaattaaattttcccaaacactgccctagagacagccccgtatcacgttggtctgtgtccttatagactttttctcttgcaacaacttacagtatttttaaaacagtaaatagccccacatcatgattattgttaaatataagttttttgaagcactgtgtataagtgtagattaaaaaccattttggtttactgtaaaaactctggaagacaacctaggcaacaccattgaggacataggcatgggcaaagatttcatgacgaagacgccaaaagcaattgcgacaaaagcaaaaattgacaaatggcatctaattaaacttaacagcttcttcacagcaaaagaaactatcaaccgagtaaacaacctacagaatgggagaaaatttttgcaagctatgcattcagcaaagatctaatatccaacatctataaggaacttaaatttacaagaaaaaaacaaccccccaaaaaagtgggcaaagacatgaaaagacacttttcaaaagaagatatacatacaaccaacaatcatgaaaaaacactcaacatcactgatcattagagaaatgcaaatcaaacaaaataccatctcacaccagtcagaatagctattactaaaaagtcaaaaaatattagatgctggtgaggttgtggagaaaaaggaacacttttacacttatggtggaaatgtaaattagttcaaccattgtgcaagacagtatggccattcttcaaagagctaaaagcagaactgccatttgacccagcaatcccatggctaggtatatacccaaaggaatataaattgttctgttataaagacacatgcacacatatgttcattgcaacactattcacaataggaaagacatggaattaacctaaattcccatcaatgatagactggataaagaaaatgtggtacatatacaccatggaatactatgcagccataaaaaggaacgagatcatgtcctttgcagggaaatggatggagctggaggcaattatccttaccaaactaacacaggaacagaaaaccaaatactgcacgttctcacttataagtgacagctaaacaatgagaacacatggacacacagaggggaacaacacacagtgaggcctgtcagaaggtggagggtgagaagagggagaggatcaggaaaaataactcaagggtacatggcttcatatctgggtgttgaaacaatctgtacagcaaacccccatgacacaagtttacccatataacctgcatagatacccctgaacttaaaaaaaaaaaaaaacattttggttttagaattctgaataacaattcatcatatttatttttaaattcattttgtcttatattttctggcatgcagtttggaaaggtaatatatttgttttgtaagatttttctttagtttttaaaatttgtgggtgcttctatgccttcatatccttctttgtatggagactttcctagttcctttgtctcgtgtttttccccagttgctctccactgttacccatgggcattagaatcccttggacgccttcagatttcctttttggaggctcctggccccattcctttgtaattatgtggtgttccacgtccctgatgttttattagttcccaacatacttgatataagagaggtaattagtgtattatggcttctttttgaattgttccccaagataagcagagggaaatgttacatgggtaaaaatttacataataatgtgaccaggctttgtcgcaaaagctcactgtaatcatgagaaaatgaaagcattttatttatggaaagtttccgcatgtatttgtctctaagaattaaaaattgccactgcattatggtggcctcagatttcagaagaaacattgtactgtgtttacttgtaccgtgccctgcctttctaaccaaacttgaataccctcttttctgttctgagactgttctatggccattccaccattgattgaaaccaaagccaaaccagaacattaaatatgaaatgctttttccctcacccacaggagctttgtaattatatggcttaaaaaaaaaaaagcactgaattcttaaatgagagtgtttagtaaaatatttggaacagcttcagcttcctactttccttcagtgaaccatggctgaaggtaacgttttcttggtcaatgtgaattgcgttccttcccccggtgcttgattttcctttgacctactccgtctccatagtttgcatgaggtggcccaagcctctttccataattttacataggtgttaccgcagaacgctgccagatggctgcctgtcttggtggggagaagtccctggatctgctgtcctttttcattctcagcactagcgtcatttctgccacaagtcttccctgaactcaaggctgggctgagggctattccccaggcactcacaccttacattggcaagaccttcctccacttgtatgatcctgaaatgttctcttagtgactcttttccaaactaaaagctccaggggggcccctgagcgaagttgatctttacaaccaccagggcccagcaccatatctgggatgtagctattgctcgataaatatttgttgaccagaaggtaagtgaaccgagtactccctatccactgtgtgtctacattcctgccaacccctgtatatatatgacaacgactcttcagtcccaggcctaatagacttgccccagtcagctccttcctgatttcatgtaagagtgacacgattgaatacttcctccttcctgaaacgtttccccctgttggatgtcggggctcctgctctctgctcgcctctctcctaggcctgtctctgaggtttggccaactcctcttgtcacccctccagcactatgagcaaggaattctggttctccccacaccatcttttttgaaattgcattcgaggtctccagcatctcttctaggcagatacctgaagggactgggcttcatgtagtcctcccaggcctgccagactttctggccttcaactaggagcttcatgcgtgtctgtggaaggagtgaccaatggacaaacatacaactctattttgaaagtgggttggggctgggtgtggtggctcatgcctataatcccagcactttgggaggcagaggtgggtggatcacaaggtcgggagttcaagactagcctggccaacatggtgaaaccccatctctactaaaaatacaaaaattagctgggtgcggtggtgggcacctgtaatcccagctgtgtgggaggctgaggcaggagaatcacttgaacctgggaggcggaggttgcagtgagccaaaatcgcgccattgtactccagcctgggcgacagagcaagactgtctcaaaaaaaaaaaaaaaaaaagaaaaaaagaaaaaaaagaaagtggatcgagtatgaattatgaaattgcaaagactagaaggatacatgtgggtcttgcaaggccttgcccttgagtttgcaatcaactggcttgtttaataaacaaatatgtgctaaggatgatggctcctcatggaacttagggcatgcaatcattgacttcagaataaaactgtagcttaggacccaaagagaagaacagaggtaaggaagaatcatgagctcactcgctgctcaccccttccagtgcccacctagagtccttcagggatcatagcttcaaaacccttccagtggattctttctgaagttcattctcagactctcagtgatctttactaccttttaaattaggaatgttcttcacaaaaaggaatgctacaggttacttcactgagtacgaggtgaagattccaagtgttcattttctgtgtggctgtatattatttgtgtgggaacccacattcttatctcaccactaaagatcaagaaagtactttcaccagccagcaagcatcacttgtatgtggtcattgtatgattacaacggcaggtaccagcaggtgtattaagcagaacacacacatacaaaggcaatgattttaaattggactttggattaaagtaatatatttaacccctcaagagttctgactgtgttaaactcatttataatcatgagcaaatgagtctatactaatgcctcagatgtttttgaatttggcaacttctatttcctaattgtgatttaggtttaaataactttttcacttatgctcacctgtaatctttgtatgcctttatttctccccgtggaagtattcacaggaccctaattcattagtttggtaatagctctttactgctttggacttaaaggtaccctcggtatttttaacagacacagatgtgctgtcccgtagagctgtcggggaagaatgccttgaatcccgaaccacttgctcttgttcatagtacttaattttcacttactgaatcatttgctttccaaaaaccaccttgttgcatgtattagtttgttagggctgtcataacaaattaccacaaaccgggcagcttaaacaacgaaagtgtgttgcctcagttccaaaggctggatgctggcagggtgggttccctcagagagctgcaagagagaatctgttccatgactccccctggcttctggtggtttcccggcaatctttggcattccttggcttgcagaagcagaagcatcaccccagtctttctccatcttcacatgagttctcccagggtgtgtttatgtccaaatttccccttgcctttatttttattttattttattttattttattttttcgagacagagtctctgtcgcccaggctgtggagtgtggtggtgcagtctcagctccctgcaagctccacctcccagttaacaccattctcctgcctcagcctcccaaatagctgggactacaggtgctcaccacctctcccagctaatttttgtatttttagtagagacagggtttcactgtgttatccaggatgttctcaatctcctgacctcgtgatccacccgccttggcctccaaagtgctgggattacaggagtgagccaccgcacccagcccaaatttcccttttttgtaaggatgccagtcatattggattagaggccttaccttatgccagtgtgaccccatcttctctaattatatctgcagcagccctttttccaagtcagatcacattctgaggtactagaagctagaacatcaacatgaattttatggggatagtttgtattagtccgttttcatgctgctgataaagagatacccgagactaggtaatttattaagaaaaaaaaagtttaatgggctcacagttagttctgcatggctggggaggcctcacaatcatggcagaaggtgaaagtctcgccttacatggtgtcaggcaagaaagagaaggagagccaagcgaaaggggaaaccccttgtaaaactgttgaatctcgtgagacttactcactacgacgagaacagtatgggggaaagcactcccatgattcagttgtctcccactgggcccctcccacaacacgtgggaattatttgagctacaattcaagatgagatttgggtggagacacagccaaaccatatcacagttcaacccctaagagtgtagctaatacctgaaataatcagatgacatttttatttgccaattctgtgtaggagagatgggtagaaataatagtaaattgcattgagtgtatgatcagagactattgagaaaggtgattgttgtcagatcctaaattatatgaaataatttgggggattgtttttgacatatgtcatataaaagtaacttatttcccaggtttcttattttttctgaccagctctttgtccatactgattcaataatttcccaatgttcttcagctaatggagaaaaagagtttgaccacatttgtaaaatccaatctaactaatgtatttatgttttagctttttattatgtacattttcatatatctggaaaagcagagagaatagtataataaaaaccatatactcttcttgcaactttaataattgtcaactattaccaatcttgtttcatccatcttctctccacatatttttcttgctggagtcttattaaggaattgcagatatcctgttatttcacttgtataattttttttaagttagagaaatgtaatgtcatactttctcactgttgaaattgaggagaaaggtaaaactacttaatgataagtattaggacatacaccttggcttttacattgtaatgaatttaaagaaggaaaagcaggagataaaggaggagtggggagggtggggttgggaagagagaggatgtgagagacaccagctcctttacatgtttccctccctaccacgtttccctccctaactaaactctgagctccttgagggcagaaactgtgtcttggtcccccagttaccttcataccttatagggaattggtgtatagtaagtgtacatcagtaaacatttgctgaataattgaatgaataaaagaatgaacgatgctcccccaaaaccttgcatagaaagatacagagacatgctcagaaaaatacaccacatttagctctagaggtaagacaaaagaaataaaaagatcctgaaaggtacattgcttctcgcagttttcaggatattttctctcacatttagatcccgtgtagcatttctgcaaccctgccaagaagcaggactgtcctaacgtgctgagtgcttatgcccttagcgagggagagaggtttcatccatgctgtgagagctcattcttcatttgcattacgtgagaatcgaagcctgagttctgagtattttgactaccttccatcctctcagaattctggagccacactttgttttgcctgccatttgggagaagattggggttgctgtgaagcttaaagtgctacacattttgctgaagaaagagattgcagtctcagatgtccatactgccggcagacctacatgcttatagatgtgagtgacattgaagcaggggaaacaagtcctgttccactacactgaggaggccttggactgaaggcaagagagaggagagaaggcagagcatacagtcccaaagccgagtccagcctccttagctccttgcaactcacactcaaaccccagtttaagtaattccagactgaaaaataaaaaccttaaaaatattgcagagagaagtttggtattagagtcatgataaacccttgtatagaacgtgttgcaatgattattttttagggtcaaaatgaggaaacctgacatgcacactgggttttggatgttcagacatgaagcttgtactgccaagtgaggaaggctttatgcccttaagagattaaaggaaagttggactcatcagttgattctgaaatcaacccccaaacactgcttgatctgagttttcaaaagctaacctttgggtttctctttaaatatttttgcgtgatttgtcatatacttatctttaagagttttgttgttgttgttgtttacataaagcagttaccatttaatgctacaggtactcaagatttcattcatgcatattcttagtcaatatgagaaaaatctatttcattgtagttctgagttgaatatgggaataagttgaaataataaaagaaggagactgtttatctgttggcaaacgtgtcgctgtcatcatctgcatccttctaagtgtgtggcttctgggccatcatgggcgagtaatgaccacatcccattcttatcttttctccttggctctggaaggagtcttttatactggtgattgccggactgttcttgagatttttcttccctcaaccctctccagcccccaggctctcttctgactcttcccacccctcagacagcctcgtcctttctaccatcaaccacaacacttgggtgtttccaggactcgccttgcagttctccctcaccatgaagacatctctcatggcttggtccacagtcccccgttgtcttttggcctctaaccttgaatctccacctgcttgtctgacacatctatctgggtggcctaacagtatattatacttttctcaaattgagacccctgtttattgtttcattatgttttattgatatataatagttgtacatattttgggggtacatctgatattttgatgcagatatcaaaataccatccaaagagttctttggcagcgtgtgcacaggtatcagaatatcagatgcacccccaaaatatgtacaactattatgtatctacatacaatgtgtaatgataaaatcagggcaactgaaatattcatcatctcaaacatttatcttttgtgttgggaacattacagatcttttcttctagctattttgaaatatacagtaagttattaactataatttccctgctgtgctatcgattactagaacttattccttctgtctaactgcatttttgagcctgttaactaactggtcttcatccctttctcctcttttttcttcccagcctctactcgttacctctgtgagatctacttttttagctcccacatatgagtgagagcatatgatgtttgtcttcctgtgcctggcttatgtcatgtcacataatgacctccagttcttttcatgttgctgcaaatgataggatttcattcttttttatggttgaataatactccattttgtagacatactacgtcttccttatccattcatctgttgatgggcattaggttgattctgtatcttggttattgtgagtggtgctgcagtgaatatgggattacagatgtctcatcggtagactgatttcccttctttctgatgtatacgcagcagtgggattggcggatcttatggtagctctgtgtttagttgtttgggagagtccatagtgctttctgtagtggctctaccactttacattcccaccagcagcatccctgccttcccttttctctgcatccccaccagtatctgttcttttttgtccttttgataatagccattctaactgtggtgggatgttactgtgattttcgtttgcatttccttcataattagtggtgatgaacattttttctcctacctgttggccatttgtttgtcatcttttgagaaatgtctattcaggtcttttgcccattttaaaattgttgagtgaagagtttgagaatattttttccaattctgtaggttgtttcttcactttgtttcctttgctgcacagaagcttcttagcttgatataatcccatttgtctgtttttgcttttgttgtctgtgcttttgaggtcttaccccaaaattttgtccagaccataatgccctgtagcataaaacccctgtttaaacaacatgaagagtagtttctcctctttgagctcgtataatactcagattgcaagtccccaagtccaagttaattcttaacttgccccttggtcttctctgttcattttctacaacctgccaatttaccctttagtatttagaattctttctgtggaaagtacagaaaactcattcaaactggcgtgaacaataaaagcgtgtatgatatgactttgtggattcaagtgtattaaattatatggtatgtaaatgaagaaaatgacatttttaaagggtatttaatggttcgtgtgactgaacagtctgaaggtgatagccttgctgacgccaagatctggtttctttctttctcctctgagtcttctgtactctcagtttcatcataaggctcacctcttggttgcagagtgctaacaccatttactcagttgctctggccgggagcttggggccgttcttgactcgcctttccttcacatcccacattcaatctcagccctgtcttcaaagtatatctcaggtccaaccaggaaggaatgcacaaaagatgctcagtagtctttgttgaaattagagaaaaagaaggcaagggaagaattaaagatgaatctcctaaagaagggggaaagaggcttgcctgcttagaattgggaatactggatttttgaaagagttcattgggagcacgtgcacagatgctgaaaggaagaatcaaggtgctgtctgaagaatgacattctttataatatgtgatagagtgcatttatttgatttgttttcatacaacttttaatgtgtatcccaggagaagactgttttcattgttacaaatctgaaaccaataattttcttttaacatgcagatataatataagctcactttttcattactttccctacaaagctgaaagcggttgacttgccttagagattttcctttcattatattctgctgtgacgttgcctttcattaatcccttccagctaagcaaaatttaattagaaccatatcacgtgatggcaaccatttttgtatttaaaaaaaagaattcaaggaagctcagctaccagtcttctcttctaagcaaagtctattatatttagtaggttctttccagaattcagaatatgttacataatggctttttcttcattaattttggataatagggaatttctatgcctgtgttccgttttacatgactgtgacctgaatttaaaatgacatggacttgagggtgaaaggaaaggaaattattttttaaaggagaaatggaaaatgacccttagcagtgcatatatatatatatatatatatatatatatatatatatatatatttcccccctcaatgaatatagcaatccgtgttagatgtaaatagggatgaacccattttgcatatagattaagtgaccaaatatctcagtagtttggcaggaaagccaagcctgcagcctgaggggcctcacttccaccatcattattgacaactatgtgctcaagcgagcagggagggtgcaaggaacacgtctccaatccttaaagattatatgagtcctttgctctcaaatctgaattttccctttgtctccactttatgccagcactgattttatttagaattttatagaatggaagcaaattcattctttctttcatcctttcttttctttctttcttttccttccttcctttccctttccctttaattcctttctttccttttttttttctttcttgagacagggtctcactctgtcacccaggctggggtacagtggcgtgatctcagctcactgcaacctccacctcctgagttcaagccgtcctcctgcctcagccacccaagtagctgggattacaggcatgcaacaccacacccagctaatttttgtaattttagtagagacagggtttcaccatgttggccaggctggtctcaaactcttgacctcaagtgatctgcctgtcttggcctcccaaagtgctaggattacaggtgtgagcaaccacacccagcccaaatactctttcttgatgtcataatgaactcaattatgaacacaagtaatcataaaaagtctatataagcaaggttcttactgcctcttcctattcctcttatttataatttcataaatattgctctaggttgataagttaaaaatttttatagtaggttatgtataagatttaccattttaaccattttaaatgtacatgtcagtggcattaagtaccttcccagtgttagacgaccatcactaccatccatttccagaactctttttttttttttttgagatggagttttgctcttgctacccatgctggagtgcaatggcaggatctcagctcactgcaacctccgcctcctgggttcaagcgatttttctgcctcagcctcccaagtagttgggattacaggtgcccaccaccatgcccggctaattttttgtattttttagtagagacggggtttcaccgtgttagccaggatgatctcgatctcctgttttctttttgttttttttgagacggagtcttgctctgtcacccaggctggactggagtgcagtggtgtgatctcagctcactgcaacctctgcctcccagattcaagcaattctcctgcctcagcctcccaggtagctgggattacaggcacaagccactatgccttgctaatttttgtatttttagtagagacgtggttttgccatattggccagggtggttttgaactcctgacctcaagtgatctgcccacctcagactcccaaagtgcagggattacaggtgtgacccaccgctcctggctgtatgaattcttgagccaaacacaggtgactgttatttgttctgtttctgaaatatactttcgacaagtggtgaaaactctccttaatttccatctagtttacttccataagcaagattagcaaggaatatggatcacaagattgggtgttctcagttttaaagccaggcaatgtcaagatttgttatttggccaagtctgtggtctttattatttttttgtcccaccatgtcatttgctcagtgtgatttgtgcatttccagtgtcgtccgtcactgctggggagcagacaaatatcacatagaggattagagaaagtgattttgtgcttagaaaataattgaatgaagatttactttgtgactggaagctgcaggatagcatcctgttttaaaacctctcattgggttatataaccagaggtgaccaaagtctttgaagatgaggcaccatctctgagtgagtttttgttggatagcctatgcttgcttgagcaaagacttgtttaagggccaaggggggcccccacgacaatcatcagatggaatcttccatgacacgtctccacttccttccagctgagtggctgttgtctttaagttgccttccttctaccaaggtcaggcagatgtttgttgaaggtttgctatgtaacaggtaccaccttattacctctttactccaatttcctttgcttcatataccatggtgagatgaattcctttagagccccaaattaaaaaaagacaaaaaacaatagctcctgatttttagccaggggaaaccctatgatgtccatctccaggcaaacctaatgcatccttttgttttattgagccagtcttttcctctttcaacaatgctagcaagacttctcaaatgtcttcattagattatcttacaaaatatgcattacccaatttagtttggaacttggacccaaagatcaaggccagccatctctgatttttggaacctctggctgttgctcagttttctggggcagcctttcccaggcacatgctgcatgcagccagcgtcggccaacctccaagctcctctttcctgttcccctcacggtaagtgggggtgttggggaggagagggggcatctacactttttctccttagtcacccaggattgggcacattctgtttcttcttcctttggagatcatccattctgaatttcgaatcttcaagtaggcttagagggctctttatccctcagataacgtgtctatgagtggctgtctggaaacacatggcctttctgtctgcctctcatagggtgaatccagtccttcaaatgggaagctttcgtgtaaggtaggtggggagggggtagttaaggcaggttgggaggaaattattttgggataggtaaagctttttgctgcctctgcaaattgtgctggataatgagggcccgggtcttcttaggataacattcggcatgagtttttttgaggtgtgcaatagaaatacttccagctgtagatacataattgcattgacctgcaaatcatagacagaaagaacaggtacaaaaagcaaactattcttccatgggatttgataagtgtgagttttcttaacagtgttcactgaatgtggagatggttttttttaaaaagagatgaaaggcccaaatgtttgaacgattaagtagggaataggaatgcttattttccaaccaaaacactacatctgtaataaaccgtgatgaggaagtaatgcccctgtaacctttttcctttggtaatttatctttcttattccagtggatgaaagatgactgtgtgcctggggagagagagcagatcagattaatttgtgccatcacagcacggctttattatccgtccttcgagagttttgcaatcaagatgcttttagcagaaacacagtggagaaaggccacttctctcagggcttgtaggagctaagcactgccctttgagtgtctctgtgctgcctgggcagccaagagggctgttttcttcgattcacactcacctcctcctgcccctgactgtgcagggcagacaggtgtggccagcgtgctgggcagccagcaggatccctcacccagggcacctccccctctaaagggatgcttgctttaagagctctccacttgtcacctttctgtggatggttcctgtttggttatctggctctttgtctgctcaatgccaggcatgcattttcttttttaaaatgtatatttttacagtgacatggtatcatgagtacctttaaaatgtgtatttttacaatcacattatattatgattaccttaaaagaaaaccctttaaaaagaattatccatgattctatttccctaatatactgtatcttcatcctctgagttgtatatatgtgtatatgtgtatgtctatgtaggtatatttgtgtgtgtgtgtgtgtgtgtgtgtgtgtatgtctattttgtcatatacccattttcctgttacccatgtaaaaaatcttggcatcagctctttaccctttctgctctggaaatcctgccagtgcatatgacatgatgaaaggacggggggctgtggtgtccagcaactcttagcatgaatcctgattccatcacatggtgactcagccttgggaaagaccatcctttgtttgttggttcattcatctatccatctgtctgtcctccctgcctcccttcctgtctcccgttcacaagcattcactgtacagcatgctagatttgggggatctgggcagcattttcccatccataaaatatagatattgcagcatattaaggagcattgttaggaggattcaatttgctaataatgcatgtgaagggacccagtacaacaacagcaacagcctggcacgtgataagatgctcagtaaatggtgctgtgtggtcagtcagcaagtctcatcgttcttgtgtaatttccctggcctctgttacttccatttcttagcagcctgcatgatgatggccaattactttcatacctagactatgcaagaggcttctaatgaggcattataggcctcaatctattctattaaattcttcctattaccaccatttgcacttctaaagcattgtttttgtctgtgttactctttgttcagaacctttcagtgatttcctaggctattctgaatttcttactggccactcacagccctctcagtactctgggctcctcttgggatttcagctctgagccatcctgccaccctcttccacctacggaaatgactcaccctctttggtcttctgtatctactgccatatgtgcagggaactgtattatcattggtgagaggagaaaatagcgtatgagccacacatttgggaaactctaaccttccttgtgcagagtcttagttcatttttgctgctataacagaatacctgagactaggtaatttgtaaagaacataaatttgttttcttacagttctagaggccaggaagtcgaagatcaaggtgccagcattgagcaagggcctgtttactgcatgctcccagggggaggaagaccttgtcctcgtgtggcagaaggcagaagggcaaagagacaaaagggggctctactcacctttttgtaatgacattaattctacccctgagggcaaagccctcatggtggagtgaccccccaagggtcccatctcccaaaactgccaccatggcaaccaaatttcaacatgggtttcacagctgacatgaaatcaaaccacagcatgcagtaaagacttatgactaacctagtattcctgagggtatactgttttttaacatgttgttattattcaacaaatgataagagtagtagatgatgcctttttggagctagacttcaagctttcaaggagagactaggtcatttattttttgcgtcctctatcttattaccatcaatacaaacctttcagggggacatgtgcagtagctcaacgcctacaatcccagcactttgggaagccaaggtggacagattgcttgagcttaggagttcgagactagcctggccaacatggtgaaaccgtgtctctacaaaaatgtaaaaatgagcagggtgtggtggcacttgcctgtattcccagctacttgggagtctgaggcaggaggatttcttgaacccaggaggttgaggctgcagtgagccaagatcaccccactgcactccagcctcggtgacaaagtgagacccggtctcaaaaaaaaaaaaaaaactcttaggggattactttctataacagttattttgttgattcatccttaggactatttatcataaccatgttaagctttgaaaatatttactgggtagtagattttgctgaatttgcaggaactctcccaactggtgacagaatctgtagcaaaaagacagatataggaaggtgttaaggtgtttgctaagattgttttgattcatttcaaaggtctgttttctgtagattgcatttgtgtctgaatgagtttattaagttgctgaggaagtcctgcaacccacatttagggatactcacattatttataatcagttattctctttatattttatttcaaccacggaatacaatgtttatatacatttatatgtgtgtgttagtgtgttgctataggatggtgcaaagtattttattttattttattttattttattttattttattttttgagacggagtttcactcttgttgcccagtctggagtgcagtggcatggatcttggctcactgcaacctccacctcccacgttcaagcgattatcctgcctcaacctcctgagtagctgggattacaggcgcccatcactatggccagctaatttgtgtatgtgtgtgtgtgtgtatttttagtagagatggggttttaccatgttggccaggctgctcttgaactcctgacatcaagtgatctacctgcctcggcctcccaaagtgcttggattacaggcatgaaccgctgtgcccggctaggatggtgcaaaatgttctaaattttgtttcccggtttctactttgggaaactgtcttacaatctgattctcctctccctcaacttcagagagtaagagccacagtttgtggccctgtcagtgctggcattttgggactctgttatctatgagtctaatcaataccaaatgttgctgattctagaatgaaatgccttctgattgctgtttataagattctgtctgtagtgaaattaaattgacttctaacagcaagtatctctgtttggaaaataaagctcgtatgttaaatcatgtctattctaattttagtttcctttttctctaccagtttgctgttttgtggtccacaagaggtgccatgaatttgttactttttcttgtccgggtgcggataagggacccgacactgatgtaagtagtcctgaaatcatgatttgatgtcaatgtggatttctgagctttaatttttttaacgcctgtgcaactgttagttttggcacttactgttaatgggaagactcaattctcatagagcgttggcttgtagtaatgagcagatttatagcccatatgagctctggactacatcttagagaatttctcagaggagaatttcttggtagcatgtactgttccactttgggcagctgcattgactaaatccaccaaatttattgtaatagctttcacaaacacaatgcagttgttgacagattttacaatgaacatttatcacccttcagtttatttccgttccctcccctcccctccccacccctcccgtcctcttcgatggagtctcactctgttgcccaggctggagtgcagtggcacgatctcagctcactgcaacctccgccttccaggttcaagcgattttcctgcctcagcctcctgagtagctggcactatagatgtgcaccaccacgcacagctaatttttgtatttttagtagagatggggtttcatcatgttggcaggctgttcttgaactcctgacctcaagcaatccactcgtcttggcctcccaaagtgctgggattacaggtgtgagccactgggccctgccacccttcagtttacttctaagctgaaataaaccaataggagcatcattgctttgggccaatgtaacaaactgctcctggtttactccaggggattcttgctgccttttcggtgtatgttaaaaatgctgctgctgattgaaataatttagcatctgtttcactgaacagtgatctctgaagttgcccatgtgtgaacacataatttcctctctttgtggacaattctgatggtctctgttgcatctcttgtgtacttaaaaatgggatccacaggccgggcacggtggctcacgcctgtaatcccagcactttggaaggctgaggcgggcggatcacctgaggtcgagagttcaagaccagcctgaccaacatggagaaaccctgtctctactaaaaatacaaaattagctgggcgtggtggcgcatcctgagatcctagctcctcaggaggctaaggcaggagactcatttgaacccgcgaggcagaggttgtggtgagctgatatcgcaccactgcactccaacctgggcaacaagagcaaaactccgtctcaaaaaaaaaaaaaggatccacaaaggagtcacggaaaataccaatgtctaaaatatgttggatagagagaaacttcagctgttatatgaaaagtaatattttaactgaataaaaaaaattgtcaggcaggcttagaagggtagacatttctgttctgaattgcttttgcttgatcagtttagtcactcaaattgtgtgcttgaagcgattcccatctttaatgcctgttcccatcaggaaactttaatttgaaagtggctatctcagtgcaggcaagactaaattcttccctttgcgaaagatgacatttttgcagtgtgctctgagggattccgatttgcgttgttgtaacacaagtaagaaggaagttactgtttggtgttcagtgcacgggaacatgcacaatggggttagggtgcttgtggaggcaagatagagtgcctgttgtgggctctgagcccacatacacatacacacgggttccacaaaggctcacaggacatgggagccagaggaagctcaggcgtcaccttgttttataacttcatggacaaggaagcccaagtccatgaacgttgagtgacttgcctgcatacaaacaaaactagttagtgtcattcccctgccctcccccctgctccccgcctcctgccccctgccccggccactttccatacttctcttctggcatattctggaatattgtcttcctttggggcattttagagataaaaatagctggaacgtaaagtactaacttttccaaaaagccaagtcccattgcacttgtttggagttgtctaaaacctcatgtcatagcctttcacttccttgctcatcattcccatctttatcttgctgtatttttctttcctctcttctcttctctctcctcccatttctgccccatcaagaatgggaagggaggatgggcaggcttcaggatgtgagtagtttgtctgactcccttctcttcctttttcttccccctcctactttttcattcttttggttgagtattctttattgagaacccataatgggccaaagtctgtgcttagtcctggggtataacactaagtacagagatatgctccttgccttcctggacattctgctgtgggaaggcagacattaaaatatcactaattcaaataggatacaggtacactgagcaggtttctctaagggacatactgcatttaaactgagcttgacgaatgggtaggagataggcagacaaaaggaagggtgtgtgtgtgcgtgcgtacgcgcatgtgtgcacacatgcatgctgggctgtatggggccctggaaaaggctgtttcagacaaagggaagagcaagtgagaatgccaagatatgggaaggagtttaatcaataacaaacagaaagctgggagttgggtgtctggcaaggattttgggcacaggcttaggagcattgggggcccaggaaagagtttaaccttaagggctcatctcttaatacagtcacattggcggttaagtttcagcatatgaattttcaggacatggaccattagcagacacattcagtgtgagatgcctgacgctgggagtcagttgagtatggaggcaggtgtggcagtcagaagtggggtatgtcctaaagataaagattcctatgatttttttttaatgccttggatgtggatcatttttgcctagggagagggtatagagtggggagagaagggattaggtctcaggagagagctctaaggaactccaacatgttgcatgggagaggaagatcagggtagggaaaccaagaaggggcagccagaaaagtaggaagaaaaccaggggagtgtgatgctgattgaatgatttcctaaggggctataggccaatactgtgatcgtatctctgtgtttgttatgaattctctacgttgctgaaactgcgtataagtaggtaacatacagtttgtaaaggacaatcttatttacatgggaaagtctttgtttatgcccaccatggatcaattgatgcctgttaattatttttggtaactcatttcatgctcagattttttatcttgtttggctgatcattatggggtcatcctactcatagggcctggagccaggtaaaaagctttagaaaagatatgcttggtgcgaaatataacggaaacacacccgtgagctgatgcccagccatgtcctgctcctaatcttgtgttgactttctgtagatgctgagtcttacacttaaaatatccttgaaagtaatgatgattagatgaattttttttaatgtgaaagagaaagaggtatattagatattcaatgcagtcctgcctgcctggttcacaaaagatcatgcattcacccaaaagatcatgcattcacacctgcatccatactcaactgactcccagtgtcagacatctcatgccgaatgtgtctgctaatggtccatgtccccgaaaattcatatgctgaaacttaactgccaacgtgattgtattaagaggtgggccctttaggaggtgattcagccatgaggtggagccttcctgaatgggaccagctcccttattagagaggtacaagggagctgttacctccatttccccttttagcccttctgtcatgtgagtacacagcaaaaaggcaccatccaggaagcagagcccagctggtgccagatacagaatctgctggcaccttgatcttggaagagaaaggagaaaatttgatttttggtctttggagcaagagacctatgactagggctttctgcagccaaggcctgagaagtgttgactggctgtatgcaggatgattttacttactgtgcaaatctgcaagcaaatcttatgaaggtacaaggtggccaaactgtgctgcaccagggagatagttggaaaatcatgaaggcattgggaggtagaactgagctgagatgctagaattttcttattttatccttttctgaataccatttttctgcaaatcccagaagtattgagccagaaggggtgttaaggatttatctgggttaaccttactttgtggatgaggagacaactaaggcaaaaatgatctggggtactgtcatatgttatctcttgagtatccagtgggcttgtggttgattctttcaaggcaattggccatgaagagaaacaagatgttggtggcttgactggattgtgctgccagtggagcacattgacagctattccttggtgcatttgttgaaaattctggtcaggtgtttggaaaactagcagacttattttaccatcttgagaattaacttatcctccagtccttttcagtgtcttagaaatcaatccaataaaaaatgcctgctggcaggctcagtgaggaagaccagtgaaaagaatgggaagtatcagaatttaagagaaaaaaaactgccctaagcatttttcccctgaaaaatttaaaaattttaaattaggattttttttttcgtaccatggagaatggttaagatgtcctgttcatgtgctgcttaatagtaccttcgttgagcttggcagactctaacacattcacagacggggaaaaagaaggtacaatccttgtgaaatcctcaaatattgtacctgctctgccatcttcaagatgaaaggatgggaaaagtactgagaaataaaatagcggtacccaggttacagtagccagatgggaagacattacaaagttcttttgaacagagatgctcttcaagactcaaggagcagtcgtagttgagagtatgcattagtgcagggaatcttggcagagaaaaggctcctgggttcacagaaggaccctccctggagatcctcaggccaatttctcaagggtcctctgccccttctggatgagatggcattctgtaccagcaaatctagagcaaaaagctgagcaattcctagactttaagtccgtccccatacacgctgagtagagaaggaatgaaagcagaagacttaagagaaccaacgttagcggtgagctcattccctggtactgcctgtgtttgcacccggggctcaggcttggatgctgaagtatgtggctcatggaatgagcagcagctgtcttcttacctggtgttgggaaggcactttgaattggtgcaggatttatgtttccaggtgtgtggccctagaatgcagcttggggctctgcccagtaccccattccagcatccgaggtttcatcagacaacataaaataagacaaaagtgctctgtgtttagaaatggcttctcccccttctccaccaaattaagatgcagactcggacatgggcaggtagaagtcgagagtagagccgtggtttttggggcagtgggagtagtgagcctggctttgctctgctgaagggcagcaagtgcccatgcttctttggctgccattgattgcctgcctccgtgggctgctctggccatgatggggtggggcagattcaggaagggctagtggtgtggggtctgcagggctggctctttccagacttcttcctctcacttcttaaaaccttagctcaccagtgtcttcttgatcagtgcggagctccctgttcttagaagagtttctattcattttcgattatgtctgttcatgaagcccaccctgctatgaagaggaagaatggggtctgggggcctcccattatgcatctgtgcatggatgtattgatatgtatttgtgtgtgtatgtttattagcacattaagccctttttaattttttttttttcttgagacagagtctcgctctgtttcccaggctggagtgcagtggcgcgatcttggctcactgcagcctccacctcccggattcaagcgattctcttgtctcagtctcctgagtagctgggactacgggcatgcaccaccacactcggctaatttttgtatttttagtagagacggagtttcaccgtgttggccaggctggtctcgaactcctgaccttaggtgatccactcacctaggcctcccaaagtgctgggattacaggtgtgagccactgtgtctggccctttttaaaattcattttctctgtgtgtcttaagtgagaaagctacaaagcagcactttgacagaataataccaagctcagtcctgctcttagggccacaatgtacaactccccctgccctgcagctttctttttttttgagacgagtctcgctctgttgcccaggttggagtgcagtggtgcgatctcggctcactgcaagctccgcctcctgggttcacgccattctcctgccttagcctcccaagtagctgggattacagttgcattccaccacacctggctaatttttttttttgtatttttagtagagacagggtttcaccatgttagccaggatggcctcgatctctggacctcgtgatccgcctgccttggcctcccaaagtgctgggattacaggcatgagccaccgcgcccagcgtgccccccagctttctcgtcaaaagttgtaagaagagaagctgtttttatgtgtcatccataaaataacacacatgctaagcaactgtttacacataatctttagagtgtttactctgtgcattggatatgtggacatttgagaaagtaaggggtggtgggggagagagtgggagagggatttgttaaaaggcttcaagcgtctggaggtagtaagctttcctcgcgtttttgttgagccattatgtttttatttgccccatgtgtttttaccagtgactctggcttctctggggagaaacttttcccacagtattttgcacgttttatgtttgaaccgtcccgttgaacagaattcaggtgacttcgcaggttattgctctatctcacctggcagacaaccaacatgtataccggtgacgtcacaggttcactgaagcctgccagaatgtttggaaggggaccaaatgaatacattaattaacttgttaaaagatagggaggcttgcttcagacctgggtacaccttcaagtcagtgaagatcataaaactgatctatttgaagaagctgagcgcactgactgtaaacatttaaagctaaaaacggaacctattgcacaaattgctacaaaccaaaagtgatatcccctgtgagactggactccgtggaggactatatgtctagaaagcaaaattgctttcttttctttactacaatcttgagaattctctctttctccagtccttttcagtgtcttagaaaccgatcagataaaaaaggctgctgaaatgttgaaaattcagcatttcaaagattcatttataataaaatttaaagcatttaaaataaacctagaaataaatttaacagtgaatcttctgttttttcgaagtgtacttttaaacattgaatttagaaaaagatgattttgtgagcaaagccagttctacccccaaaacatttttatattcctgaactgacacggtaaagttagatttgcatgaggtacagaagctaaaaagttgcatttaaaattcagcagagtatatcgtgcagagagtcctggagtgggaattgggagtcctgccaggccacattactgaagccctttctagacctttgttttcttacgtataaatatggaggttgaatttagagatctttaaagttgccttcagccccaagtttcattatagtccctctgttattaaacattgattgatagccctgtactgtgaaggttacaaaggtaaagagagttcctgccctcccaaggcagggattatcctctaattgcaagggtaaaccaattaggcaaagagttgtactataagattgcacagggtgggccactagcagtggcccacgcctgtaatcccagcactttgggaggccgaggcaggtggatcacctgaggtcaggagctcaagaccagccaggctgaccaacatggtgaaaccccatctctactaaaaatacaaaattatctggacgtggtggcacacacctgtaatcccagctacttgggagactgaggcaggagaattgcctgaacctgggaggcagaggttgcagtgagccaagattgcaccattgcactccagcctgggcaacaagagtgaaactctgcctcaaaaaagaaaaaaaaaaaaagattgcacagggtaggtgccataagtggggaagaaataaaatgctgctgagtttagcagggagagagccagcctgcatctaatgggagaatgcaggaagagcttcataaagatggtgacatttcaagatgtatttcaattcttttcatcattttcctttgaaaataagtccatcagtgtttttctgttgctcatgttggcccatgggagttacgtctcttgcctaatgctgccatccagcagtgcctacactcaggtgacatatttgccagtggacctgtcataagagtgcaaggagggaagcctgtaatgttctgcatgtcctgtcgggacccccctcccatgagcctctgaggaagcccgagtccatttctgaaaccaccctcggcacttgcccgcagatacccttcttcacttgctgtgatgccacaggaaaccttaaaaagaagttatttcggggaaacacacccaacaaaaaaactccagtgctaattctgctcttcagtgggtggattattttatgtaccagattcacagtaacagaagtatttcctacaagggaagggactcctgctgcacttggaccaaattaatttagccgggagttaaaaatagcctccgagacttctatcctcatccgtagttctgatgagcaaaaggagacagtgggggagtgggtggcatggccattctcttgacccaccaacctctggccacagggaagagggagggatgagtatttgccccgttgtctgcacctgattagctgggaaaaaatgcgcgacgtaattacaaagaaaatgctcccattttcaccagtgtttggaaggcatgttttcaagggagtcacctgggggcttgtcagctgaatccctaggttgtagttcctacctcccatctttggaactccacttttgaatggcctggacgggcagtagtacatccttttcaaaatccttacccttgccgagttgtcagcctctgagagggtggtgagattgtctcgggaggcagacaacaggccagtggaacccagtcagaataagggagccttttgaggtgggtagaattgtttttggtcaaaaaagaggtgagatgatcaattagagtgattttgttgtgaaacttataaaatgcctctgacatcaagtctgggaacagatctttgtgtattaaccatagagagtgtgtttgaatcattgtataatgtctccggggcacttttatttaatatgcttatttatttatttacttattttgaattttagaggtgagacttgctatgttgcccaggctggacttgaactcctggacataagtgatcctcctgcgtagctggggagacaggcgtgagcagcttcacctggggcatgtttggttttttaaaaattatttacttggaggccaggcgctgtggctcatgcctataatcccagcactttgggaggtcaaggcaggtggatcacctgaggtcaggggtttgagaccagcctggccaacatggtgaaactccatctctactaaaattacaaaatttagccaggcatggtggtgtgtgcctgttctcccggttacttgggaggctgaggcaggagaattgctcaaaccctggaggcggaggttgcagtgagccgacatcgtgccactgcattgcagtctgggcgacacggtgagaccccgtctaaaaaaaaaaaaaattatttacttgggatctggcctaggcaacatagcgagaccctatttcttaaattaaaaaaaaaggtcatattacttaatgatcatatttacacagtgaattctttgtgagagggtcctgtgtgttttctctttgaaagccgagtgcctgatacagggcctggcacaaattagatactcaaaaagtattcgttgaaccaaagagaatgagttggtgaaggtctgataacctaacttgatcaccagtcgtatttatccggtcttgaattacttgaatatttacagctgtgcgtgagacttttactgaactcccttaatacccaagagtagccgtctcatcagcatcattattacggctgatgctgggggtgtgggggaacacacctgatgggcttttctgtttttcccagtaactgtttcaaagtgtagtcttcactatttggaatttagtttaagaagtagtgggtgaggcaatagcttttgactggttgggatcaacaattggtatgatggattccttgtttattttttctgaccgatccaagtgactcagtgatactagacatttcgtgatgtacaaacagccaaattacctgaccctgagaactgttgttggaaatggtgtctggagagcctgctgtaggagtgcaaattctcggaagcccagagttggaagatccacggcacaggatgtgacatctttgtgataccatgtatttagcgtctcttatgtgtctggtgtttttcttgcatttattcattgtatgtaaacattaaatgtttcttgagcatttattgtgtgtgaggtattatgggaggcaaaggttaaaaaacacagttcttgtcttcaaacaacttatccttagtgggaagtcatgtatatgaataaatattactattcaaatagtcacttcagcggataacatacataaatgcactaggtatgcattattgttcccattgtacagatgtgcaaattgaggcttgaggtagttaagtgattctcccgagtgcagtagtaagtggagcactaagctttgaactggacctctcaacttccaaacctgttctttttccacagtaccacgtgactgaacagcaaagctaacttaggggcagttttctgtcagtgaaggttccatttttgtgggtggagtctggggtcattgtgactatgagaaatcttaaaatggtaaaagaaatttggaatcatacaatcctgagacattaacagtaaaaaccttcacaaggcagattagcaacgtgaactagtaaagacaggagcatgtagggctgatgggaccgggtgggagctggcagcagtttggagacttggtttaggtccttctgaagagggtacagagtgggacttttcaggacattgggtttctggaaagatccgtttcaagtgtctacaccctaagctgaaagccagcccagagagctttttggctcatgctggggcttattcctggattctgatgagtcatgttttttagaagctgaacttctaaacttctaagccgagtcccattcagttagctggtaccttcctcaccttggctttgttttctgtttttgctgcttaatacatttccagcaggagatttaggaagggtctgtggacagagaagtagatttcccaggatctaagaaaagaaggttggtttactgtgggtattctagctgtcattataactgtgttattttatttatttacaaagggatcatgagccagaaccaatcataacaatcaaatgaacccactcactgtttcagcctctgatggtggctaagagaaaacagcaagtggggagcaccccccctcacagtcgcctctattatgttgtaccagaagctgggatccagcaccctcaaacgtagaggcttgtactagcaagagtcacatggacagtgggaaggtccattctaattattttgttagtaattcagtctgttctatttattcttataatctagcacattccaaaacatatttgttttgagaatgataaaccaaggggaaaagtcaggttttaagaagaatgtcatggccacgaagataacactgccgttgggcgttgccgtggttctgactgggtgaaggtttcccagtgaccatctttgtgtggaaagagcactctgctcctgatgttggggatgtcatgccacccacgtacatcactgtcctcagcattccagcactcttgcctattctccgtgcatctcttccaccctgcaagccattgcttatgtcaccctgattgatcatggtgtaacacccagctgtcctctgcacacaggatcccaagccagaagtctcaggattttcttggttgtctccatcttttttttgtttcacgcacctaataggtttccaagtgctacgagttctgctttcaactctctttcctctccatctccatagccactgtctttgtgaaggccttgttgtgtgctgtgagttggtcttactgactctggactgtttctcctctatgaactgtctttcatattgccaccccgtggtactccagttgttgttgtttttgttttttaatgtgattatgcactctcttgcttatcatcttccaaggttggtacagagtcactcacagcggcctcactggctgttagctgtggctgctggccagggagtcctaaggtctgccccacattagcttgggagggtagtgcaggttttttacaagggagtggcagttttccaagaaggaacacctcagtgtacacacacttaataggcttcccctggcgctgtgtttcccagtgtttcattggccaaagcccagagtcactgtgaaggtttatgaatcagggttctccagagaaaaggaacgtgtgtgtgtgtgtatgtgtgtgtgtgtgtgtgtgtgtgtgtgtgtaaagagatttaatataagatgttgactcaatgcaattatggaggccggcaagtcccaagatttgcagggtgagctggcaagttggagacccaggagagccaatgggatagcaccagtctgattctgaaggtctgggagccaggagagctgatgatgtaagttccagtccaagctcaaaggcaggcaagcttaagacatcagctctgaagtaagagctgatgttttagattgagtccaagagcaagaaaaagctggtgaccaaatctcaaggccttcaggcaagaagaatcctctcttacttggagggagaggcagtctttttgttccattcaggccttcaacagattggatgagatccacctgcactaggaaggacagtctgctttgctcaacctcccgatctaaatgttagtatcatacaaaaacaccattgtgtaaacacccagaataacgtatgaccaaatgtctgggcacctggggcccagtcaagtcggcacataaaattaactatcacagaagggtgtggaacctgggggtatgagtcactggggccgttagtgtaaccatttgccacaggcagacttgtttgggttataattctttcctgtaaatcttattcatctctgtatccccaatgcctagtatgatctctgacttatagtaggtgatcattaatgtttgttgaaagagcgaatgaatggaaaaaaaaaatgaagtctttgattccctaaagaaaatgaaaataatttcatagacttgagtcaagcttgtccaacccaccttattttgttgtcgtggtggttctgttttgttttgtttgagacttttggcaacctgaagccatgttttttagtttctatctctagtgataagcagaaaagagggatgaggaaggggctttactggcccaacaagaaacagaaactaagaacccatgactgtattctctcccttggacactcctaggagtggaatatctgtgaaatgtttcctgcgattctctcagaatcaataccagccacttcctgattacaagttaccatctttagaaagagaattttgttttcggggggaaaaggttttttgtgttgagggactcttcagtgcttgaagtttaagcctaacgaaattatgcaagatgcccactgaactgtgcctgctgtgtgaccagaatctcttaacctcatgagcattttttggttaaatgttggtaggaaaaactgcttattgaaaggcaaaacttgttttgtcacctgcgtattttagggtgatcatccttgaagtgatggcttatcatgtagagaggtttgtaaccaattgcaattcaaaagggagaaatggagagagctaacagcttaaggaatcaatagcctttgatttctttcccatttgatcactgcctttctgggtatattcctgactttacatagcctgcctttgccaggacagagactgtcttcagaaatcttagagtttactattcttgttcatgagaaattgttatgagattgctgtaggaaagtatgtattttactaattttattatttttttttgagatggggtctcactctgtcgcccaagctggagtgcagtggcccaatcatggctcactgcaacatcaacctccctgggctcaggtaattctcctacctcagcttccctagtagctgggactacaggcgtgcaccaccatgcccggctaattttcgtgttttttgtagagacgggattttgccttgttgcccaggctggtctcgaactccggtactccggtgatctgcccacccctgctccccaaataacgtattttaaaacatacagattataactgctttacaataggtgaggcattttttttcgtgtcataaaacatgcctgtgatgaatgcctttaggaaagcagtacgcctattgctagctttctgcacttccaagtcccaagcctattcctcctcatccctttttcaaggcaggaagctttgtagaatgagcatgggatatcagtgtttaaaacataagaatttcatactcgaaaatgatcttctctgtggaggtgggtgattttaggtttctagatattaagcttgtattatgactcatttgttcttaaacaggttgttctccagttactaaaattaatcacaaaagaccaaggaagcttgaaaaagaaggggagttcatacagcaggtcttaaaattagaaaggcagggctgctctcttttgcatttgctcagtttgaatgatgcaccaggatttaggtaattcatcgtaatcgttgttttttccccattaagaattggtaactgggaataacttaatgtgtaaaactagacggggaagaaaaatggtaggctgaatatttaagaaggaatcacattcctaggtattaaaggggcttgggcttgcggatttgctgctcgctgtcagtttggacacgtgtgctcaaatcaggtcattctctcatatagtgaactttttttttttttttgagatggagtctcgctctgtcacccaggctggagtgcagtggtgtgatcttggctcactgcaacctctgcctcccaggctcaagaaattctcctgcctcagcctcctgagtagctgggattacaggtgcacaccaccacactcggcttatttttgtatttttagtggagacagggtttcaccatattggccagggtggtcttgaactcctgatctcgggtgttctacccccctcagccttccaaagtgctgggattacaggcatgagctactgtacccagctgtcagatagtgaacttctgtccatccggcagccagacaatgagagagtccagcacagtagcgcctctgaagaaatacactgcttgccaaatagcttcctagcttggctcctggtttccattcccatcccctacagtttaccctccacagtagctagtctgatgttttgcaagtgttaatatcaggcagatcaaatcattgtgtcactccatctgaacccttcagtgccctcctcttaaccactggaataaaaaatatgtatacccagcctggccaacatggtgaaaccccgtctctactaaaaatataaaaattaactgggcttgttggcagccacctgtaatctcagctactcaggtggctgaggcaggagaattgcttgaacctgggaggcggatgttgcagtgagccaagatcacaccactgcactcagccttgatgacagagtgagaccctgtctccaacaacaacaaaaaaagtgtgtgtgtgtgtgtgtgtgtgtgtgtgtgtgtatttctttctttcccttggtccacaaggcccatcatgattgtgatctggctcctgcacacctcactgaccagaacatcccaagctcattggcaccccagggctgctgccctgggcggttcctctttgtagaactaatcttcatgatgctcattcgtacgatttcagactccgctgaaatactgcctccttcgagagcctttttagatcataccccccttgttattattatttttgagctggcccaggctggagtgcagtgtcatgaacttggctcactgcaacttccacctcccaggttcgagcaattctcctgcctcagcctcttgagtggctgggattataggcgtgcaccaccatgcccggctaatttttgtatttttagtacagacagggtttcaccatgttggccaggctgatctagaactcctggcctcagttgacctgcctgcctctgcctcccaaagttctgggattgcaggcgtgagccgccgcacctggtccccctcattattttctattactttatgcacttcaaaccccctgtcatcatctaaaaccatacaatttatttgttacttgattattgggtatctttccaccaacttgaaagcaccgtgagagcaggatgttatcttactcttctgtttaacctaaaatggtgcctgatgtgtggtaggtgctcagtgaatatttgttggctggatgagtgaatgcattttagttgcacaagggagatgaaagatcttatagggttttttgtttccttctaacaataaaactaaagggaaatgtcctaagatcaatagagactttttcctttctatgactgtgatgccatgccagtgaagcctgagacctgccgtgtgatcggacatcttccaaataaaaggtgtgttcttcttaatcttaatgtttagaatatgcagcctataaaattaattttaaaataaaatgcatacagtcaatcttatttaactagaatacttaaccacttgattctgaatgttgcccattctggataagtgaagtagatgttgaatttaaaaccttgagaataatttgtatctaataggatcctaaccttgaatattatggctgcatatcgacttgggatcagtgtcctctcttagattgtcctctgcagtcattaatttttttctgctaatattcttggtgagcagtagggtgttgttaagtaaattgatgcatcagtgtgataaaatacatgcagccattaagaatgatgcttataaagacatagaaaaatgcttatatgatgctaggtgcaaaagcttaatataaagttattgccatgattgtcactacagcagagttagtgtaggggaacaggaagtagaagggaacctaaaagatggaaatcatttaattgatttttaaggtgatttgacatagggagattttctttttggatttaatcttgttagaacaatacaattttcaacagttataaaattctgtttacagtagtccccacttatgtgtggtttcagttacttttagtatagtacactaagatattttgagagaccacattcacataacttttattacatacagtatattagtataattgttctattttacaattagttattgttattaatctcttactgtgcctgatttataaattaatctttaacatgggtatgtacatataggaaaaacatagtatatatagggtttggtactagccacggtttcaggcatttactggggtttcttgggatgtaggccctacagataaaagggcgactgtacttgtacctttctctagtctaagccatgtaattctcttgaaatatgacagagcactgtcacctcccagaatgctacatgaatgaaacatacccacccatctgagaactctccttcgcccaacagtgtgatgagaaagttgtctgttgcagatatctacactgctgcatgctaagtgtgtcatcctgggattcaaacgtgagtaatagaaaacctgactaagcagcgacttgaactgaataggaggctcgctctcctcatttaacaaaatgtccagaacagggcagtccaaagctgatacagcagctccatgtttctgtgcgggacccggcctcctccagcgtttagtttagctgtcttgtcttgtaggcttctttctttcattctcatctttgttacccggtaggtgtgagatgcctgcttcattagcatcctacccgtgctccaagcaggaggtgagccaaaggtgaactcaaatcacagatgcttgttaaggccgttcccattcaaagaactcctccagaaacaattccattccagcagtttccatttacatcatcttggccagaaccatatcatgtagccactccgatttggaaaatgttaggtttctggtttatctggatggttttgtttgcttgcttttgttgagcatgtttctacctggaacaaagttaacttagttttgtgataaagaagggatgtggccgggtgcggtggctcacatgcataatcccagcactttgggaggccgaggcgagtggatcactaggtcaggagatcaagaccatcctggctaacatggtgaaaccccatctctactaaaaatgcaaaaaaattagctgggcatggtggcctgcgcctctagtcccagctactcgggaggctgaagcaggagaatcacttgaacctgggaggcggaggttgcagtgagccgaggttgcagtgagccaagattgcgccgctgcactccagcctaggtgacagagcaagactctgtctcaaaaaaaaaaaaaaaaaagaagggaatgaatgttggataggtaactaacagtgaactctgtcgtaaagttgctgaggattgccttaccatgtgtgcacacgtgtgtgtaagtcttttcaatgctcctattgctgtgacttcatctctagtacaggaaggattctgtcacatgacgtcatgacaggttttgagatacagtggaattaactgagtttcttgatctgctgatgacagaaaaaggagacaaggatgaggaagtcttgtgtgagtttttctttttttgcggggggtagggtgtctcactccttttgcccaggcttgagtgcagtggggtggtcacagctcactgcggcctcaattctctgggctcaggtgatcctccccccatcagtctcccaagtagctgggactgcaggagtgcatcaccatacccagctaattttttatatttttagtagagatggggcctcgctatgttgccctggctggtcttgaactcctgggctgaagcaatccgcccacctcggctttgcagagtgttgggattacaggtgtgagtcaccatgcccagcaatgagtttttgtttttgttttttgtttttcttaaacaaggcttttcttttatctttaaacactttgttggttctctctgtttggtagttgtactatgtctaagttgtttattttgttaggagcattttgttgtaatcatgaaatattttgagattcaatacttgtgtttattcagtcataatattcttattatataatacttcctgatagtagatattaggattgattgaagcaaagcatgtgtattaataaactcagtattcattaaagcagcttgggttgcctgtagaaacggcagagcatccccaaggctgagggaggcggggctcctctgtgggtagcagacttcatctgcaggacaatgtgcagcacaggctgcgggtattaaaggagggatcaagaaactggtattaccaggggcacttgggaggataggggatcaggtaagccatagcatagagacccagaaaatgagccaggaatgttcagtgtgaaaaaaagaataaggctgggcgtggtggctcacccctgcaatcccagcactttggaaagccgaggcgggtgaatcacttgaggtcaggggttcgagacgagcctggccagcatggtgagaccccgtctctactaaaaatacaaaaattagccaggcgtgatggtgggtgcctgtaatcccagctacttgggaggttgaggctgcagaatcacttgaacctgggaggcagaggttgcagtgagctgagatcataccactgcactccagcctgggcaacagagcaagactctgtctaaaaaaaaaaagaataagttgcaggacttgatatgagagctgcctttctaggaagaagggtggactcaccttgggaactccatgtgctgacccagaccactgacaaggcgttatcaggggacagcattttatacaaccctgagaacaacctccagtgagtagatgtttccagcaacagaacaaggactgcagaacagggaggctgaggtggcttaacaagaaatgctagctctgatctgggccgaagcagcagtgatggttcccctaggccggaatttgatgcgaggctaggatggatattgggttttctctctggaatagctcagctcctcctgtgccacctggctaatttgtactctttcttcaagaatcggaattggccggtggttcacgcctgtaatcccagcactttgggaagccgaggcgggcggatcacgaggtcaagaaatcgagaccatcctggccaacatggtgaaaccctgtctctgctaaaaatacaaaaattagctgggcgtggtggtgcgcacctgtagtcccagctacttgggaggctgaggcaggagaatcacttgaacctgggaggtagaggttgcagtgagctgagattgggccactacactccagcctggcgacagagtgagagtccatctcaaaaaataaaaaattttcagaattagtatctcaggagattttcctgactactccctgtcccccaatggactcctttcttcccctcctcgcccccaattcagttgtttctcttccacctcctgcgtgcctctttgaagactttcataccacttgttgtaattgttcctctgtgtctgcccatgcactgtggcccttgagggcaaaacctatctttcatctccccgtccctgtcctcagtgcttacacagaatctggcatgtatctggctctcaacaaatatttattgaattagcaagtaaatgaatagagatcagattctgcttgagttaaccttgacgttagacagaatttctgttctaacttttttcacgccaaaaccattcttacaggtttttctgagccaatctgttgtggcctcttagcataatggatagttactgagaaaaaagaattaacaccaagttcttggcgcaagtgccatccagttgaggtgtgcaacttccatgcttgtgacaaggttgaaaattactcatcaagctgtttttgcaaagcagtttctgcttatcagtttacgcatgaaaagtccactctgtgtctgtgttgatgaccataacgtggaccatctaacagctaggatatttaggatggttgtgagtacggctgcaggttcccttttgcttattgaaatagaataaccagagaagaacaaggcaagttttaaaaataacttggtacacatgtaggtgaaataaccttacctcccagtagctgagagaaaaaaaaaagatctcaatgctggctgttgttccaggatatttttagtaagatggccctgtcgtctttgatggtcaatgaaggaataatggcagaaaaaaatattaggcgaggagaaggctacgggcattgtttggtgtttcatttaatttccacctcatccaccagagaaaagcaaacataagcagaggttgatgatgagcacagtagaaaggaaaatgtgatgtgtcttttccttgtagttggttgataatatgtgatttgcttataccacattctgatgggaggtattttcagtctgtggctttgtaagttgaagggcctcctaagaaactcctgtttcgtaagatattctctgtcttaacttttttcaggaaaaaatatgattttttggagttgcttaatagtttttagcttttaaataagtatagtttatttaccacagcatttgaactgtcaggattttactgtgaatgctaccagaaaggtttgttctatttttacgagaatcttcttagggaaattgatgaacctggtaacctaattttagacctcctgaaatttgacagatggatggtatttatagtgttctgaatcggtccctattagacatttaaaaatagtcacatcattagagaatacattcaaaaaagaaaagatttttaacccaaaatctaatgcccagaaaatttttagtctcctaaactgggtgtgcattttggtaacagtttctaaaaagcctttttgtactctcctcattctctttcctgtgtgatgctgctgttgtcatggaaacagatcttggagttgctttgttaataccgtgtaagggactccctgaaatggagagttactgcaggtcattatcatcaacacagagctttaatatcaagtgttgtgctatgatgcgtacactacaaagcacagaaatctgtgtttggaggttacactaaagacatttaaccttgacacccataaacactacacaaacatcagggtcttcagtcatagaacctggaaaagtggaggcaatgggctcatgctatttctattgcagatagtgagctatgtcctggtttggggccgtccgttgttaggtgctccattagggctggcttattgagaaaggaggatttggaagattgttgagtgaatccaggaaaggagcaagccgaaagttcacagggattgttggaaatttccaacaacagtttagatggaaattggctcctgggatgaaaaatggctgtgcatattgtgtttgagtgcttggaggcctctagctagaatgtttttattagcaagtttatagcttgtaagatggtccagtcagatattcatgcaaggcattttatgatgtacgtgattttgttgactggggccttaaggtgggaaacagttggaaggtatagtggactcttgctgccctgggactatctcttgcctccccacttatcagcaaattccataaccttcctggccctcggtttcctcacctttcaattggtgattcttttacaagttatactgggaattaaatggggtggatgatgatacaggatcttgaagcgcctggtgcttggtaagcactaattcctccagcccacactttctttaacatttcctatgccagcagttctcaaaggggcttgccagacctcagcatcagtatcacctgggagctcattagcagatattcacacaccacagatcttctgaagcagcaaggcagcggctggggcctggcattctgcatttcccaagctctccaagtaatgcctatgtttgagaatcacaaccctagactatgtttctggggccaagattaccttggatatggttgagtgcagttctccttaccatgtaagattcctggcaattcccagagctcatacacttcactgttaaaataaggtattggagaaggtggcttttggattcctaagctattggaaggccaggataactggtttgttttgtttgtttgtttgtttgtctgttttggctgaaatgcagtgatctgatcatagctcattatagcctcaggtacatgccatccacactaataattttttttttttttttttttagacagagtcttgctctgtcacccaggctggagtgcaatagtgtgatctcagctcgccgcaacctcctgggttcaagcaattctcctgcctcagtcttccaagtagctgggattacgggtgcctaccaccatgcccggctaatttttgtacttttagtagagatgaggtttcgccatgttggccaggctggtctcaaactcctgacctcaggtgatccacccgcctcggcctcccaaagtgctgtgattacaggtgtgagccaccatgcccagcccaccgtgctaatttttaaatcttttatagagtcagggtcttgctatgttgcccaggctggtctcaaaactcctggcctcaagcaatcctgcctcagcctcccagagtgctgggattacaggtgtgagccacttcaaagaacagaataactttgaatgcacagtttgtatttgtcttgctatcaaaaggcacgttaagttcaacttatcaaaggtaatgcagttagcaaccatttttcccctaaatttcaggtatccagatttattatttagaattatactttctccttgggctaaggaaacagttggccacacttttctactctatattcttcattcctattccaatgtgactgctgatttctgacttttaaaacctaaaagatttcttcctaaacttatcaggaaaagtaaaatgactccagtaccacttgccactgctattttagagacagtgaaattctctgaggtctgtcattcctgattttattgctttataaaagcctgctatagaatgttttttaaaaatacaatgatttaaaagtctccatgccagggcagcactggcaaatgaggaggcaggaggtcttcatgtaggagatgcttcggggacagtgtggcttgtggcagcctcaggactctgggcatctgtccactcagtacaaaccaaactgcagctccaactaattttgatttggaaattgcccccttaaaaaaaaaaagtactaaaaatgtttgacatttaccagatttctgcagcagtctgcagtttctcttgcaagtatattcacagacagtgaaaggaagtatttggcaattgctaactcatgtttttatatagtgtagaagtccaaagatggtaataatgtcatattatagtgatggcgatctatagtgtaaagtataatgaccataaaagagttctcatttttatagtttttaaacatgatttcagcatccagaggcaaactcctatgtaaggataatggtcgtgcatggccacagagattttttttctttaattctcaattgcttttcacgcttaactttttctaataagtactatctcccaagattccagaagatggtacaaatgagaaaataaggtttatcttttctctaagaaagactaaactgtgactttttttttcctttctggctaattaggacaacaaaagtaaacatccaattatgcagtgatgaatcaagtcatctggctggagctggattctttagtgtgttaagttacagtaaatattgaaaagaaggactttatgcagtaggactgttttcaagaaaaagaagaccagtctcagccaaattcaaatatcttgtagagaataaatgcctcttgggtttatggatttatgccatatgtgtgagaagagaaaatacggtcaagaattgttgtatttcttgactccttgaaaggcaagaacactggcttgggaaatagggacacctggtttctagtgttagataaatcttcagaatacagaatgctctttgaaataacaaaatacttgagtgaaggaaagaattgaggaatgaacttaaatttagctctgaaagaattctttcttcagtctgtggttcccttagctactattcaatctctcatttccatcttagccatattttagcttccaccctgtatgacagagacaggggtctttctcttggtttggagcacacatccctcaacatgtccagtagggagctcctgggcgacgggtcctgcaggtggatgtggaccaggagccccgtgggaggaacgtgcccctggggagagctggtggataccccgaatggcaggccacctggggcaaagccagtggaacctgactatggcaggatgagaacaccagtgttttataatgcccacttttttttcacttcttgcagtttctatgtttatttcctgttagcatttagtagtatctttatgagtttatctcagttatgctaggcagaaaggagctcttgtcagttggcaggaccgaaaggagagaataggcagggggaagaggggacagtaatcgaagtaggagcaccttgagcgaagtgaaatgtgggatggaaatggaagctcctgtttgtgatctcccagagaggctcagtccagcgccaggtgccgtgtgcttgtggaataaagagaccgaattccttctgtactgggggttcatgctgaaccccacctttgttgaaggggaggaaccagctgcccaaggcaaactagaagcatgcttgcaggagggaaggttaagacacacagtttatgtgcatagcagtgaaaaccatagtgtctgttctgaagtttgggaaaatagtgtgagactgtctagctgggtctgtcattggctgatgtgtagtatgtgtgggtcgctcactaaaaaaaaaaaaaagaagaagccaggccccaaaggaagagggcattattcataatgaaacctactatgaatccagtggggtcttgatttctgcttcttcctgggctgtgccaccaggacttccttgatagacctttggtgtcatcatgaattctgttactgatcccggaataaagatttggtgccctccggtttccaacagtatccagagatggccagggaggatttggatgggaaggattaaagtttgtatacaggagagaagacagtactctctgaagtgtgtgtggcctgagtcacctggtagaggtgggcttgggtcaggttctggtcacactgtcattctggctgcagaagaagaagcaagatgagtcaatcagtgtaggatttcagagtgtggggcactgacttcccaaatttggctgcacatctgaatcacctgggatactttccaaaatgcattcccccagttcctccccgaaattcaggcaggtcattcttaggaaaaactgggagttaaaaagcacaaactttggagtcaaatagcacttgggttgaatctcagcatcaacatcttttattggttgtatgaccttgagcagggcatttaacctctccagaccacagtttgtctgtgggcagaagacaaacaatcctacttatttatagagttttgggatgaattagatgaaataatgcatttaaaatgcctagctctttgcccagcatatagtaatcattcagtaaatattagcttatgtttaaccaaaatgtgtatgtcagatccctgcttagtactgtgggaacatgcaaaagaattagaaaaatcatgctcccttccctgaatatggctgagaaaaagcgaatgcacctgactatttggtgagttccggcaggaggaggggacattgtaatgaagctcagattgccggaagatgctggaaggatgcactttggacctaaggcaggtccagggtggtgcctggtggacatgaagaaggcagcaactttcagagcgagcgtcagaggggcttgtaatgaacagaattgccttctgatgatgtcaacatatctaatacaagactctgactaattactatttatagttgcttatattcaaaagcttgtttatgctgcaagtaaggctgaaaactgtcagcagggtgtagtggaaagagctcagagctgagtctgaactcctcaatttttatcccatctgtgctgctgactagctgggtgacatcagacaagcctcgcaactcccaggcctcagcctctgcaacatatacagggtgtgtgtgagtgggaggagatgggggattagacaactgctagggtcttctggctccaacattcaacaaaaacatttactgcacttctttcccaaaacttactgtgtgccctgattttcaattcctgatactctgtaaggggcattgttcagtggaagactgtgtgttttgctaatttgttgcttgcgattcagattcctttaaagttagcaaagagcatttttgttacattggaacaatataggaagtatccttcattatgctttcatttgtttttgagtcacaagaaactgttactgttgttttgggagactgatgtgggaatgtcttagcacatcatttctctactctaattttaaatacgggtagtccctgacttataaacagttgacttgagatgacccatatgtacagttagtactatcttagatgtgagaatccagttctcatctcctactgcagagctcttctgtaatttttcaatcagaacacctaggagatgtctattcttctcatttcacagatcttcactgcttgccttttatgggccaggttctcttctgtgccctgggtatccagcagtgaactaagcagacaaatctctgtgctcacagagcttaggttacagtgccattggcctggaaggtacgcttgcctattgccccaggtgaggaggagtctgtgacaggtatctgggtctgtcttcctctatccaagatcacttcccccacctcttccctgcaaggagactaaatcataaaaccacaatgcctttttatgtagaaacaatagaatatgtgactgctaggtatatgtagtatattgcaaagaatagccacagatcctcccatcctggttacatgttctcttataacgtgtctttgccatgctttcagtcagatgtctatttctctactcctgtgagtcaagtggctttgtgacttcctttgaccagcagaatgcagtgcagttgacatcatgggagttctgagctgaggtattaagagacctcacatatcccactcctgcttcttcactcagaacttctgcagccacagaagttctgattaccctcctggaggatgagagaccacgtggagcagaaatgagtgtaaaacaaaccagcaccattgagttaggccatcaggcacctgcagctgcatgagctttcaccagcttaaagtctcaagatgctcaccatcagcatcatatttttttgttactaataattgaaagatgtaaatatttatgaacttaatatagatattaatatatttcctatttgtcatgaatgaaataggccctggaaggttggcattggaaaatgcctttcacattttggaccatccacttagagacacatttttggaaaagaaccacttgaaatctggtgcccagctgtacacgtgttttgtggagagagacagattagcgctggcacgtgtgagacagtggttagtgaagggtggaagatcgccagggctcatggacctgcttcagatggatgtaaatagttggagtgtactggaaaggtatgggactaacatgaccctgaccagagtttggacaagtgtggtttcattctgggggactgacacttatttctttcctagaagtgttgatgaaagtcatgactcagtaatatcagaagtgtgggaccaaagtggaaaataaactcctgacttcatgaattaaacagaaacatgtcagggccactccatactcttcttcctgtcttccaaaagtctctttttttttcaattcagaagaaggtctgggaacattctgtgcacataattattttataaacaatattttatttaatgcccttgctaataatacttcctataaataaacaataagagtcgtcatggttccagattgcctttatgataatgatataccatatgtttaaagaaatggtctaaaagacatactgctgtgattgaaacatttttggaaattgtgtatgctaactgtatattgctctacagaaatctgttttgatcagtggataaaagcagctacacataactatgaggaaatcttgagaacatttattagtaattaaatatatagctgaaatatgtgcctatatgtatatccgaaaattattataggagatggttttcagtgaagatgattgggtggctttgaaataaataagtggtttggtttatgattaatggatttattaatttgctatggtcacctaacaatccaccccacaagttggtggctttacaacaacaatcatgttatcgcttccagtcatgttatcacttgcagacataatctgcatgtcacctgagggttggctgatttcacctgtgctcagctaggcatctcggcctctcattgtgaggctgtgaatggactctgcgccgtacctcttctccaattctgacctggggcagctagcttgggtgtgctcttcccagggctaagggggcaaggcaaacccaggaggatgggcagaaacactaagtctggttcattctaggcttggtaggggcatgtcgttacttctgtctcattatgttggccaaagtgagtcacatggctaagctcaaagttaggaagcagggaaatagactgtatctttaggggaggaatttcaaagtcatatgaaaaaaaaggtatggatactacagccagggatgaacatttggagccagtaatgatattcacccctgtgtctgtgtgactcctaagaagagccaagacttgttaaagatgagcagagaggtaaattagtttggagatggtgaagaagcagtttggggatactttggtctgcgtataacattgaagacacctgtctttccttgtataccaggggttgcaaactatagcttattgggccacatcctgcccaaggcttgttttattggaacacagccatgtccagtggtttgtgtgtgtcttgtgtgcagctgctcagccctgccacagacagttgaatacttgaggcagagactgagtggcctgcagagttgaaaacattgactaccgggttctttgcaggtaaagttagctgactcctgtttgatatgatgcaactggatagaatccatttggctataatctccgcctctctacctgcccaccccatacccgccccagttccttttaggattttcctactgtgctttgcattctcattattctgtgtttttataaaataggtaaaataggaggtaaagttatcctggtgcctggctgttggcactgatgaccaatgcaatttgcatccacaggtcataatccttaaagtttataaggcgacaaattgcagattagaggacatacaaatgagggagccagttgctacttttgcctttattattaatgttttgtggctctgcgggtcattcatgatgttagacaatagggtgattatttctgttctgctgaaagacaatctgattgtgttttgtgtagaatgaggcactgatccgctctgcctgcctcccatgagaaatgccgcagacctttgtctgctcaaacctcctcccgtcagctctggtattgtgatggaagtaattgaccaggcctcatgggtcagcatatatctgtactgctgtttattcttctttctactttttaaggactaaaatcactttcttgtaaaatattacaaagacattttaaaagaaaagactgtccattgtatttttccacccccttaaaatatattcataatgatctttttaactgggtgggacttgatttggtttaaaaacaataatcttggtgactgtatggaaatacggaaaatgtttaatacagtattccattaaaaacatgatacaggttgggcgcggtagctcacgcctgaaatcccagcactttgggaggtcaaggcgggcggatcacttgaggtctggagttcgagactagcctggccaacatggtgagatggtgagaccccgtctctactaaaaatacaagaattagccaggcgtggtggctactgtaagcccaggcatctgtaagcccagctactcaggaggctgaggcaggagaattgcttgaacccgggaggcagaggttgcagtgagctgacatggcaccactgcactccagcctgggtgacagagcaaacgaaactctgtctcaaaaaaaaaaaaaaaaaaaaaaagatgcataattgctgcaggtatgtgattgtaaccatagaataagtaggtatgtacatgtggtagatagaatgatgtgccttccccctgaagatatccatgtcctaatatccagaccctgtgagtgtttttcctacatggaaaagagcataatgcagatgtgattaagttaagggtctcgtgagagattaccctgggttatctgggtaggcccagtgtaatcacaaaggaccttctaagagtgagggatgaactcacaaaaggatgcagaagcagagttgggagggttgcccttcaaacatggaggaaggggccatgaaccaaggaatacaggtgacctcttaatactggaaaaggcaaggaagcaggggcccccggaactctgcgagcacctccattgtagccttatgagactcattttggaagtctgaccccaaaactgtgagataataaatttgtgttgctttaagtcactaagtttgtggtattatgttacagcagcaatgaaaaactaatatggcacataagactggaagggaagatattttaaaatgatagttggaagtacagtgtattttagtttgtgtattttgattgggtgcttgtgagtttactttggttggttaagactaagaggcaacagatgacttttaaatgttagaggagggaaaaatggtagagtttcaagttcacattcaagtacaaatgatgaataagcccagccaaattgttctccagtttgggttttgatgtattgggttcaaatggttccagccttaatggagaagccagtttcttttttcttgttgttttattgtttttaagcctctctctggttttcagtagagtttgaccttaaatatcatctttgattactattggtgtccttgtagttaaggtctttgcaaaagtttgagtgcaagttttaagctaaaaacacgtttttaaactttcacaaattttgtaagatgacaatagcattctgtaacatagacattatggtaatagtgattttctctccatccctattttgtccagcgatttccaagttataagacgtgaataagactaaccgctcacttccaccagcagctgacctggtgggcttttgagttcaaagagtcatttcttcatcttacctccagcactgcagggccgtgtgaccttgcagagccttgtttctcattgatgaaaggagctcatgcctcatgaagccactggtaagggccatggagctcacgggccatcaagcttccttcccatcacttgtgggtggaattgacattacccgatgagctcttcctggggtcacctgggagggagtggcccatgggtggtatgacaaaatctcatagtcagtctttgcagttttctccacaggtaaaatgagattttggaaaattttcatttgtttgtatttgtcccaaggtgagtcttacatattttgagcaacaaaacgaagatcattatgaaaatgtccttatggaagcactctagggccattgctcatttttatgagtcctcgtgctaagtccctgagtactgtggctcatgtcttagctggctaaatcacagtcaaaattctcttcttaagcctcaaaataagctgctgattatactgcctgttggccagactaatcaaatacatttgatgtttcagctgactccagatacttttccttcctcctccttggttctttaactgtcatcccagatctgcgacatgcaataaggaaaactgagtcagggaggaagtaggattccttttgctgctaggaaccacgttagctttggattgtccatagaatgcacccttaacagttcttggaaaatggatgatatttggttcctgccccatgttcagtgttctttggcagctgcaaagcatatcctagctagaatccttatcgtcttgaagttcatcaaagattttgaacagtcatggtggagatacaacctaagtacattcatgcccattgagacaatcctttggtttgagcgacggaaggaggaataaacacatgaatgtattttattgaatcccagagaccctgaaacaccaagactcattaatatatgcatacatggatggcagaataataaacctcacctgacctgtcagtgtactctcagtttttaaggttctcccaaaacagggaaactgaaaaatacttgggcagaaagaaaatatcatcaaataacacctatttcttttcagctatagagatggctggatatcaaaagcaccacgggagctttgcaatttgctgcctcttttcagccctcagcttgactctcagttttcaagagggagaaaatgaatgtttcccagcattctctgtcctttgctccaaagaagagagcaggtgttggcttccaaaccttccgtattttcttattgctgttagggggatcaactgcatgtttcctgagggaaaagggtggctcactgacctacttgaaggcattctctcagtggaagctgggcaagagaatccagggatttcttttgcaggtttctgcgcagtgcccctgccatcaagctgcctaaaatgtgaatattgcttccctgcgtttcagaggtggtaatattggggcaagtggtggaggatctaaaaaaaaaatcatctttgtgctccctaccttgcccctggtatggattaaacagccaccaccctccttctcttataccctgggggcctcctgacaatacttccaattgctccattgattacttagattttttgggacacaagggcccacgttgtgtcttcctgacaacacttttagttgctctattgattacttagatttttgttggcaattaggagcttttcagtaacattctttgctccatcggtagtctctgctggctcttgttcactcaggaaacacctgagcacagggcttcaggaaagccttctattaaatgggcagaggccccagcaggactcctgcatgttcatctgcacagccagagacagctggagggcaggaggagccgcgttcacatagggttctgcagccttggagccgccgtttcttccaagtactcttcagatcagtggttcttagccctgcctgaactgcagagtcctccgaggagctttcaaatgaagcatggcagcctgggcaggttgcaggtccattaaatccacatctccggggtgggagccggtggcatccttgctttgccagaactcccccattgaccctaatgtgaaacctgggctgagaggccctgcctaaagctcgattattttcacctgtggatgtaggcgatcgcttccttttgtggctgttgtcaggaggcagaaaatcccctgggttgttggctccctggagtcttatttttacagagtgccctgtttcaggtgcagcaacctgactgatgtttttacaaatcaccttttggtggcctcctgtcactgctgtctcccttcaagggttaaataagcctctctcacccattccttttcacacctgtgtcgtgtattattggcaggcctcagtcctcagggtgtcaaatggaactgatggatgccagacattgtggatatctgcaagtcctggttggtgaccagggacttgaagagtagactttcttctcaaacttatctttgtgctgttttccttccccagacctcatagtctggagcccatgtttccaggggtggaatttgattttcccagagaggagctgtgttcggcttctaggctgaggagctaagctgccgagcctctgccagccctctgtggattcgctcctgcattattcagcgcctttgctgacagagcaccatgttccactgctgagcagatcagggtgaatttccaagagggaacattgcagatggttttgcctttagggatggattttcttactcccaagtgactcacttctggtaaaattaaaaaaaaaaaaaagaacaaccttgagtcccttgagtctgtccccaccatctttgctcagagggaattaaggagccaattcagagctttaaaaaagtcacgtgatgattcattatctttttgctggttgtttcctgccccctccccccccacccccacccactgacttgtagtttttcataagcatttattcatccttgaattttattttatttttttatttttttttgagacagagtcttgctctgtcacccagggtggagtgcagtggtgcgatcttggctcactgcagcttccgcctcccgggtttgagcaattcttgtgcttccacctcctgaggagctgggattacaagcatgcaccaccatgcccgactaatttttgtatttttagtagatacagagttcatagccaggctggtcttgaactcctgacctcaggtgatccgcccacctcggcctcccagaatgctaggattacaggtgtgagccactgcgcccggcccatccttgaagtttaactgcaaccccatctccttccctctttgcatggggtaaaaccctactgcaaggactcactagaattccttccactcacatcccctctgatgatctggccttgctgtcaattgctgtgaccatggacaagttgccttgctgcctctcctgaacatgggaggtacacaaggcctttcttcaggggtttattcccagcagctgatctgctgctgtcggtggaattagtttgcacacacagcatcccggggagtggaacagtgctttcttagcacaaaacagacacgtttgcttcccttctttcagtgaaggggaacccacggctggaaaatactggaaggcaattgtaaccttaggcagccaacaacacttcagtcctttggaagtggattttaaggaagaggagacttcaaacggtagagctctttgtgatgtacctcttagagaatacctttttgattcctacacttattctcctctcaccaagtgatacttaaagggatgccctaaaacagcagtaaagtcataggcccctttttataaatttcatgaattcactacttttttcccatcacgtcttctcttaaccaatgtatctgcatttggtttgcgtaaaagaagaaatgtttcctctgctcctgggctcaccattaattctgatgagataggcctttctcctctaaaggcaacagggcattggccaaatcccctgttttactgcatccctttttggagctcagtattggcctgtcctgacccccctggtttgcctcagaataattattaagggcatgtgtcttgaaacaagtcgcacccaaggctgctagcctgtgtattgactgcttgatttataacgaatgctgaatttggctaggcaaatgagaaacgtggtagggtcagccttctgcctcctcctggtttacagactcatcttgcccattcatttttcccatctaaggctttaatttgatacccagtgggttggtcttaagcaaccaggcaagatccagaggagactgtccaggctgccgcccccactggccaggcagaccccgttccttttgcgagtttcctgcaaggctgttgttgactcgggggagcggcttttagttgctcaggcttctttctgctgctgcagaggaatgtgttcccctgtagaggctgttggaaagggcagtgcagacaagccggcttctcaggcatttaaacaagttgtctggaggttgtcagactctgcagcgcatcagcccctccttttgttcgttcgtaatgccacagtgtttatggagccctgccttttggaggagtgggaagtggagcttccaactgttagcctatgtgtttctgtcatttagaggcaataagaagaacatgaccttttctggaactgctgccccccgcaccccccccaaaaaaattagaaaatggttagttttgattacattcaccttgaccactttcttcccaagtgaagctgaccacgattctttgttggagccaagtttttgtatttgcatattcccctcgggtaggaactgggtcagttattattgttctaactagcaggcggaattggggtctctgaggcatgagggagattccattgtcttctgtgtattctgctggtatttcatatctgatgaaggtcgattcttatccctaattgacttcctcttgggttttgtagtctgagtatttgaaatcacatgttgattgggctgggtgtggtagcacaagcttgtaatcccagcactttgggaggccgaggtgggcggatcacgaggtcaagagatcaagaccatcctggctaacatggtgaaaccccatctctactaaaaatacaaaaaattagccgggcgtggtggcgggcgcctgtagtcccagctactcgggaggctgaggcaggagaatggcgtgaacccgggaggcggagcttgcagtgagccgagatcacgccactgcactccagcctgggtgacagagcaagactctgtctcaaaaaagaaaagaaaaagaaatcacaagttgatctttctgaatgttggggcccaatgtatttgagtaataaacttgtaacatgagggaaatggacaagtgaaccttcttaaggactcatggtaatttgactctctcctgtatgattctttactgacagtgacatgaaggggaattgcctggggtagacttaggctgtctagtgtcatatgctgcttttattaatccggagatttctgattggaatatatttccatttcaatgggattagagtataaagaatgctttgttacaattatttacttacaccgccaccaccgtaagtaataatagtagttagcatttaccctgtgtgtgttacctataaggtgctgttctcagcacttcatgtgaattattcctcaaattatccccaaactctctgagactgcgctgttaccattttgctttgtagctaaagaaacagcttagagaggttgagtaactcctccaaggcatactcagcagtaggcaggacttgaacctgcgttgtgatttgtgaattcccacttttaaccacccttcactgcccatctacactgcctcttgcacatctcatattttgccagatgggaaaactcaccaaggatgaagcttccttaagatctttttgagtataaataggccatctgttgatctgtgtgtccatcaggttaggggctcttacctcaagccaacatatggcagaaaagatatgtattgatgtcttgtgggatagttaataaaacacaaatgtgcagtgcagcttctttaacctgctccatcttggacccaaattcccccacccctgctgccaaacaggcctctaactgatggggtgggtgtccccatcagctctgtgctggcccagcttccttggggttggccctcaccagagtaagggcacaaaacacagctctcgaggggttctgcagacgaccagagcctgagaccttttcttggcagctggtgtcagttccctgttggatctgtccttcccttctgaatcctagtgggatctcctcactacctggtcactatctctgttctcacaacaagatttaaacaattataggatatcagtgcactgtgagaccacaaactcttctagtccattcccctccttctaatgaggggcccccacagctgtggggttgtatcatctaagccagacctccagtttccttttcactaaaatacctacctttgaaataaaagtgaaaacttacatcaaaacagcatcatgcctggaacatactgaatggacagcatttcctttctttcccctccttattctcctgattattaattatttgcctgactttggatagctattggcttctgtcctctgatattaatgtactcataatttctgtttcttacctggttttggactaattgctctatttttatttttattttttggcacatgctctgcctctccaattctgacatttcttgcagtcctctcagcatatttctgatcacagtcccaaatgacattgagaagccctgataggaaaatgctgtgtaagaaatatgagttatttgtctgtgtgactagaactttcctggtgtaagttcagaactttccagaacttccctgaactttactctgtccggttcagaccatctgaatgcagatgtctgacttggggatagatcctccactgatcaatcattcagagaaaagccacagaaaacacacaagattagaaaaataaaacccacatggaaaggctttagtgaggttacagcatagattatgcagtctgggaaaagaaggataatgcagattaaaatatctgaaatattagaatagcataaatgtagttaacttcggagccggaagaccagggttgaatcttggcttcttcccttactggccatgtaaccttgggcttcttgcttaacccctctgagctgcagaaggggggatgctgctgttgatgtcatcatcaccaatggcagcagtagaagctatcaatgatggtggttatcacttttattaccattgtttttagtaaggagagctaacgagacaggctccaactgctcttctcccgtgggaattgcagttttctgcagtggatcctgtgacagattcctgtggattcctgggacagacttagccacctgtcctttcttctatcctcctgtactcatcagattgagcaccatgtgggtccagtccctgagatgagtgcttgatagatagaggtgaacgatgggggcttggtcttacagagctgacctgtaaaatcctctccaccatatccagtgcatacagctgggcattctttgtgtagatcaccccagttattagaacctctatttcagtaattcactctctgggctctagttcttccttgtgaattttactctcagggaagccccgactgtgctcctgaagctgtttttatttgtagtaatttagcatgcgtccaggaattgaggactcttgcctacccaaaatcagaggtggggaggaaaaccacggtatttcagtccttttgttctttttgaggtctgtaattcaccaaagccaggtccaccaaagtaaattattaccataatttatggtgagaattatttggggccacagatgtcaagtggaagcttgcaggtaagtatgattgagaaagtacaaaattttgaaatgaactctaaccttatgagtctgttgctctaaggatctaaggatattaggaggtagtgttaagaatcacaactgcattgttaaacgccaagtgttctttgtgatttgattgaaactgtagttgggattcttcaggttccatatgtggggcaacatttaaatattaacattcttgggaagattttgtatagacagctttctctgtcatccgaatgccgtgtggtcttcagagcatgtcataagaaaagtcatgagacacaaatctgatggaactttctttagcatatgtttaagacttgtcatcttcccatctcatctttgcagtagaaaaataccaacgtttccctgaacaaaatagaagtattttccacttccccatttctgaagctcctagacgttttatatttcttttgagtaagagattgctttgtatccaggagcctttgcatggtgccttttcttttactggtttgtttatttgggagatggagtcttgctctgtcacccaggctggagtgcattggcatgatctcggctcactgcaatctccacctcctgggtttaaggggttctcgtgcctcagcttcccgagtggctgggattacaggttcacgccaccatgcccagctaattttttgtatttttagtagagacagggttttaccatgttgcctaagctggtctcctgagctcaggcaatctgcccgcctctgcctcccaaactgctagaattacaggcgtgagccaccaccacgcctgactccttttctttttcttgatgttactgaagactttattttggaagtagtgagggcccagagctgatcccttctggagatgtgtcacagggtaaagaatgtggctttgaaactccaactctgtcacttaaagctgtgcctctttcagagttacttaaccactctgaaccttagtttcctcttctgcaaaatgggagactagcaacctgccacccaactgactgctctgggctatttatgagacagtctctgctctcgggagacatccctctttggcttattcatcctcactcatctgcgttggagagatgcacttggtgcctctcctgcagaaggggtgttaggaggctgttgcgtttgtcaccagggaggtgatgttttccccattgggaaccctaggccagcaaacttcgagaagtgtctgtggcagcttgaatgctgctatttaagagttgataaagaggcagcttggagaaaacctcaagcttatttggttgagtggggtggctgtgtgagaattaagtaatgagtagacctgaagcatctggtgggatctccagcagttagtaaatggcagctgtttttattctcatcccttgtgggcagtactgtccagttccagtgatgggcattagtggcatttgggatttgaggataaccttcataggttggaatgagtaccgtagcaaaacagaattctgctcttagccagaaagcattccagttagcaaactacctgacagtgtaatgtgcccagaggacccaggagggccatcccagggagaacagcatcgccatttctgctgaccacatgctgtctcctgagccccggtatctgaggccctcatcgaaggcataggcatattaacagttatgctgccagacttttatcagcagtctgtacttctccttttatcttcggaactgtgatgaaaagaacagtccactcccttctgatctcaacacttaccaaagctcatctgttcacaggcaaatgtactaaaacattttttattggagactgagtttcatgtgtagacatcattgtatttctgtgtggtgtcctcagattttcactcttgttttttccccagctgccttttttaaaaactcctttgcactcttaaacgtcaggctgagtgtatgtgtgtaaataaacgctttgggtggaggatattgttctgctgtgacaagccatcaagcagcacagcaagaaacaatacttttctaatttgtgagttattcttacgtttcccttttgcaaggctagttatttcattaaattcatttaatttaagctttgaaatcttttttttttttttgagatggagtcttgctctgtcctccaggctggattgcagtggcgtgatctcggctcactgcaagctccgcctctcaggttcacgccattctcctgcctcagcctcctgagtagctgggactacaggcgcccgccaccacatccagctaatttttttttatttttagtagagatggggtttcactgtgttagccaggatagtctcgatcacctgatttgtgatctgcccgccttggcctcccaaagttctgggattacaggcgtaagcaccgcgcccggcctaaggtttcaatcttaataagaatggctaacttttagatgagagttttacatcagaaaacctcatcgtacccagagagatgcttctttaattcagatttgaagggatgagtttccttgttctggattaaacagctcactcagacacaccaaatgaatgcagtgtgcagtcctaggtggcaccaatcacagaagagtgaaaagcataaaacagttttagaaaaggtcaccacacttagaaatagaaatccacccttgctcacgcaacccgagggatttgaaaataatttcgaaaatcaatttaaacatgtaggccacccgtcttttggagagatgcagttggtgcctctcctgcagaaggggtgttaggaggctgttgtgtttgttgccagggaggtgatgttttccccattgggaaccctaggccagcaaacttcgggaagtgtctgtggcagcttgaatgctgctatttcagagctgatgaagaggcagcttggagaaaacctcaaaaataaatactctgattcatcattgttgttcaggctttccagccgtcagagccagcccagggttctgagacaaagggtaacattcagcacagagcccagcggagagtctggagccctgactgtctctaaaagagggggcggagagggaggcagctgcctgcaaaccctggagtggggcttgacgctggggggacggcgtgtgctggttttgctgctttgggggtgaggagaggatgaataatccaaagagggacgtctcccgagagcagggaccatctcataaatagcccagagcagtcagttgggtggcgggctgccgtgcgggggctgcagttagaagcagcactcggagtggagtggggcctcccagcggggccctgctgcactttgtgagtgctctgtggtcgaaggccagctgggcctgaaggcaaaacatctggattttgcagagggttcctaggctgagacggaattcaggctgtaggctctgtgagaccttgtgtgaaacccccggttctgtctctgtcacttgtttgagtctcccatttctctgtctatcaaaagattgaatatggtggcttacaacagaggcagtcgagggtaattattagtatcatggtttgacctcgagatctggcacttcctggacctattccgttgtatatttctctgtgcactccctgagcctcccttttctcagctgagaaaatggtcacacctatggtatcccacactgtggaaaatgaccaaataagacaaggtatgtgcaagtatttggtagaaccctacagaggtaggaagtggctgttactagctgtttccactggtattctctggccatctcagagctgtttagggaccattccagctacaggggagggcaagatttagagtagactctcaaatgagtctatctgattctttggaagcacgagctctagtaagatagtttgaacaaagatgtgaccatgaggggttttgttttattttttaactagattttgatatgttgtgtgccgcttctccactgcacagattgaccaagagttagctgcagattgtggctcagtaagaaggtcttgtggtacgtgctcctgcggcccccacctcaaactcttgcctctggtgttcttgaaagaaatgaggggacctttgcccgagccaagggaaaatgcaagattttggaggcttagcccctttattgtttttttcctctgttgcttatattgatttctgcggcaaagagcagttgactgggattgaaagctactctgctggtcttggatgtggaagaaaaaataattcccactttccaaatagaggctcatccagaggcagcagatgccagaggcagcagatgctagctgcagttctgcaggcaggaattgcacgtgcaaagcagagctgacgtccagtccacgcctcatggcactttggaagtgcatctgacaccgtttgcctgccatacacaagccacaaagactttttgaggcgacaggttatgccaaaaattaagtaaaaatgacacagcttcagatgacatttacatatctatttttgaggtttcagaacatgtgccctataaaaatgtacaactgcattgtttaaaactcttctgagtctctgaggattttctatcagtgcatgcctctcagttatcacttaaatgtcaaggccctaagcttgtatgagcccctaaaatgtttttgagccccacagtaaatttttggctgaccacatttgttctatgtaaggctgataacaagccaccacgtggaatctcacagtgggactttagtatcaggcaattgcagagtcctgaagctcgtgttgcggttattatggttctatataaagccccaggggagaaagtcatttcatgcttttaaaattactagttaatgtttaaggagtttatacggagtggactgagccaagcattttccccttaactttaaaattattacagagaggccttaagaaactgttctgtattagatggtgattaaaatatgacctttttctttctttatgcttaggattttcacgatgtggtttgcaattaatttgtatgtgcacagtctttgtgctagtttctgtggacatacagtggtgctacttggccttaagagcttcctgtgtgtggttgggagataggcagttagtaagccatgtgtgctgtgagaaaacccagagcatagaagtcgcacatgagagtaccaggtgctgagtaccatgggggtgagagcaaggagggattatttctgccccaagaaggcttcttgggaaatagagcagttatgaaggacctggaaagatgttccaataagacttgggtgaggagacacaatagtcccaagtagggagggcagagcaccctgagtagaggtgtggtgtcaggaagtgtgagaattcttcagagactgatagtcggaagggattcctctgcaaaggcctgtggaaggatatgaaggttggaaagacaagtgggagccattggggagtctcaacaaatgtgtattgtattgtgtgtgtttcacttggaaaattatcttgctattaatgagaaagtacagattaatgctttttttgttttactggattcaaattatatttgacaagtcatttcattctagtgtatgcatgtgattttcttggaacgagggtaacattttaaagataggatttgatgagtcaatgaggtatttttcaagtagattacttagaaaatgttatagtcataaaatatcttggagttacagttaagagtcaattattgtttcatctataggcatccaattaaagttgaattatgctgttattttcactcaatttccaaagctatgcacttccgtaatttctatccttgtttatagtcagtataatgtttaatgcaatgtgcctgatttagcactttgtgttataaattttgcctgataaataatcaacttattttcttccgtatgacgacagttttcttcacagtgaatggagcttagtgtatttatataaaatgtaagtctgggagagtttccattatagttcaagtatatttaatgttcaaaagaatgcagtatttgtggtttcctggcattctttgaataccatgtggctcttctctcttccttctcaccaaaaccctagtcattttattatttatataatgagatactgtaagatactaaaacataagttattgtgaggtctggcttttgatgctatgaagtaccctttgttatttgagactaatgaaatgaaatcagtgagttccagcttgtctactagtatgttgcttgaaacaattacattcttttgaacattaaatttatatatttgaactataaggaaactctcccagacttgtattttatatactctaagctccattgaccatgcagaaatctgtcagcatatgagaggaacaagcggattatttatcaggcagattttataatgcagaaatacgaagcaacatagtgctgtggtgaagacagaattgaacattgttagacacttagcaatcccaagaggcatcatgaagtccatgtaccctacaccatagaaaaggctacaccccaaagttctggaacaagcctggtttgctggctttctggtgtcaaatgtcagaagcagaaaatgggaggatggtaaaacagtagactcagtgagagcaggactgaacttcagcaggccccataattgtacagaaacaagattgctaggctgggtgctgtggctcacgcctgtaatcccagcactttgggaggccaaggcaggcagatcacttgaggtcaggagttcgagaccagcctggccgacttggtgaaaccctgactgtactaaaaaaaatacaaaaattagccacgtgtggtggtgcacacctgtagtccctgctactggggtggtggggggagctgaggcaggagaatcgctggaacccgggaggtggagactgcagtgagccaagatcagaccactgcactgcagcctgggcgacacagcgagaccccatctcaaacaacaactacaaaagatttctcatggccacttagtttaggaagaagacccccatgtagttcatgaacccaatgctgtgaaccaaaatactataaacactagtattctaggtcaccactgtgatcattgagaaaatgttgaagtatattgacatattttgtttaacaaaacaagggacttaaagtgcgttttagaaatatttgtatacatgctggtttaaaaaagaaaagactaaaaacaagccttagtacataaaaagaaaatattcagttttccagaaaatgaggttactcccttacattgagagttacatgaagccttgttacagtacttttagtcttctttattcaaagaaagaattaccaatatcattttttttttaagatggagtgagtcttgctttgtcacccaggctggagtactgtggcatgatctcagctcactgcaacctccacctcccaggttcaagccattctactgtctcaccctcccaagtagctgggattacaggcatgcgccaccatgcccagctaatttttgtatttttagtagagatgggatttcaccatgttggtcaggcaggtttcaaactcttgacctcaggtgatccacccgcctcggcctcccaaagtgctgggattacaggcatgagccaccatgtccgaccaccaatatcattttttaaaagtaaattattacgatttccttaggtggttaataaattaccattattttctctattttacagatcacgaaatgataagtaacttaccgaaagttacattatttaagttaatcaaatgtttattgattgccagacttttttctaggcttaagcaaatgttggaaaatacttctctgagctttcaaaaatgttatttctacttgtcagtgctgcaggagtttaatacagataatttaggctgggcgcagtgaatcacgcctgtaatcccagcactttgggaggccaaggcgggcagatcacgaggtcaggagatcgagaccatcctggctaacacggtgaaaccccgcctctactaaaaaatacaaaaaattagccaggcgtggtggcgggtgcctgtagtcccagctactcaggaggctgaggtaggagaatggcgtgaacccaaaaggcggagcttgcagtgagccaagattgtgccactgcactccagcctgggcgacagagcgagactctgtctcaaaaaaacagataatttatctacatactgtatgactttactttaaaaaatgtttgtatccttgtagtaagactgttattttttttaatcctacatcacatcatgcattcctgagtgtgagctaccagtgtttttgtctagggctagattactagagctaaaatatcgggagaattaatgagaaaaaaaggcttaaccactgaggctctgtcaatatcagtttttgtggcaggctatgtttactttcttcaaggaaaaatgtcaggcaaaattttatcactacaaatacaaaagagaagaacattaaaaaaatctgatcattatagaaatcatagtcagtgcagaatgtttcctgcagaatccaagtgtttagtgaatgttggtggaaaatatgaagtgtgtcatgtgattggaaagtcatttaccatattcatttttcttttaggaaaaaaagtaaattagattttgtatgagaataaaccttactgagacttgttaattttgctctgaaatttactgtttgatattaatctggccagtctagctttcttttagattaatgttaccatgatacttcgttttttatccttttacttttcatatatctgtgtctttaagtctaaaacgagtttcatatagacagtatcagtatgtagtctggtccttttttatctgctgtgacaatctttgccatttaattgcagtctttacaccatttatatgtaatggaattatcattaatttacatgggattataatttacatttaatgaccactatccttttatttgcattcagttcatcctcttgttccctttttccttctgttgggatgagtatttttaattacttcattttattatgtttggttgtattagtttctaatatgattagctgtattagtttctaaggctgccataacagattaacatagagtgtctcaaaacaacagaaatgtattcatacacagttctgaaagctagaagtccacaattaaggccttggcagggtcatgcttcctttgaaggctcttggcaagaatctttccttgcattttcctacgttgtgttagttgccgctaatcctctatgttcattggcttgtggctgcatctctccagtttccgcctctgtgttcacatggccatcttccctctgtgtgtgcctgccatttccaaatctttctttccttataaaaatagcaatcattggatttaggggctaccctaatccaatattggcctcatgttacttcattacatttgcaaagaccttatttccaaataacgtcacattcacgtagacctggagtaaaggcttcgagatattgttttggggaacacaatacgacccgcagcattagttttacctcttcgtgttttgttttgttttgtttgtggttgatctagggcttgtaatgtaaatctttaatcaatcagtctactttccaacaatattataccacatcacatatggtgtaagaaccttacaacagtttacttgtatttcccctcattttgccaagcataaaatactattgctttaagctactgtagcatctcccatatctgtcccctcctctgtattcctactactactgactaaggtgagctccttgttatttcttgccttttgtcttgagtagtctggagtttcaccagtttaccttagcgatcttgcccttacctatctaccttcctttctcacttaggtatcgtgtttatgtctccagatatgcctgtgtatgttacatctctgtactttgctcacactgaacttgaacaccctcccctccacttatctttcaaacagttatttccctttcaaaaccaagacaagtcttgccttctttgaatcactcaatgcagtcagctgtggtctccctctgtgccctgctatggatgacacacaatctcagtcccaatcccaggtcctgttacgttttactggataatttgtctatcctcttcctcccaaggggataggaaccttgtgagagtcatctcctagcatctaggatgtcaccagactgataatcactgttccatgaatgtacactaaatgaagttatcaatgaatcagtaagttgagtgctggtttcactagtccttactgtttactgagagttgtttataaatgactaaatgttcccttggtaggtgttgtgatgaatcctacctaccctgggtaagttccttgactattcattgttaacttcatcgaaagttacttgagaatcaagagtcattttgacagcttcaaatattgacagaaggctgtggacatattttccagatgccttaaaaaaataggatgatttcctcattgaagtagaaaataacccttgataccaccagttcaactcaaatatttacttgggcaaataattatttgcaagcaaagaaaccatcttacggctttttattctgacacattaaagcacttaccatgagaaaaccatacaaacatcttttagataattttgaccagaaacattggaaggacattcatgacatatcctggctgcttagaggtttgcaaaacatgctgctccactctttttttcttaggcctgtacacagatcccaagtcattttttaaatgtggaaatgtttaaagggttgtagtgttttctgattacagaaaccatacgaattgtagctgtaattgtggggctagagcctgagggagcttttcgctgattcttgttcggggggatttccttgaagtcgacagtggaagaacattataaagcaaaaactacagctccttacacttctccttagctgtgaaaataaagaccaaaaaatttactgagatgatggtgaaggccaccaaacctcacagggctgagtcagctggtgcctatgagggcgcccctccttgacacttccttccttttggcaggaaggagaggggcagaaagtcatctcctgccgcctccctcccctcagaaaatgatttataatgtttgagagatctactgtgagcaaagttcaacacacatgcctaaaggacacgtcctctaacaaatgaggacttagcaagctgcctaccaggcaccaagctgtgtgtaccacacaggtatttctcacttaatctttacaacaacccattaagataggtgatctggtgtcctgagtggtggccctctctcatgcatatctgtatcccaatccctggaacctgtaaatattgccttatttggaaaaaaagggtcttgaggtgaccctatcctggactatctgcatgggccctaaatgccatctcatggactttcgaaaaggtgaggttgagatgggagtgatgctgacaaggcagggcggctggaggaggtgggagctggattccctcctagcgcctaccgaatacgtttcggcaagtttttttttttttgaagcaggctctctctctgttgcccaggctggagtgtagtggcgcaatcacagctcagtcactgcagcctccgcctcccgggctcaagcaatcttcctgcctcagcctcctgagtagctgggaccacaagtgcactaccacacccagctaatttttgtattttttggtagagatggggttttgccatgttgacaggctggtttcaaactcctgggctcaagtgacccgcctgtcttgacctcccagagtgctgggattacaggcatgagccaccgtgccgggccactttctgtaattttaagctaccaagtttatggcagttttttttttttttttttacaataaccacaggaagtccatgcaggtgccattattgcctcattttacagagggggaaactgaggcttagagagatggattaaggtgctcaagtttgtaaattgggtgtgggtggagctcggatgcatgctcagtccttcgtccagagcctgggctctcaacttctttccagtgaggaaatgcaaatttgcttctgtgactgataacagggtgggtggataccagccagggtctggtgtagctcagcaggttgctcccttctgccatgcaataataagaatcacctgtggcccaggcctctctaaagagattgaagtcttagaggaggttggtacctctccaggccacgggacgggaatgacagtgcatttgcctgtgtcgtagccacctgcttttaatcagcactttaaagggggcagaaaccacagatttcacataaattgatattgagcagttgtgtgaattccatttggacctcctctggtggtggttctaacccaaattatttaaagtatttggtaggaacacaagccacttgctgatgagagagaggagtaaaaaaagacactgatttttccattctagaaattttatttcttaaagcaagaaatccttaattgcctcctatgttgctgttcttatttgcccctttttagtggtcagtggggtgtgtttcttaattgtgatggcacagaattcaccttggtcccaaacaagaagtgaagggggttaagaaatctaaaaggaatgaagtttatggaaatgtgagtcacctctcgtcacacaccactacctcctcccccagtcaaggaattcctctgaaattccctgcatgtttctctttagactcttaagacccctgggtacttgcatctccatttagaacaacttgagagaatccctggcctgttgtatttcatatacttcccagtgtctcacacacacgcagacttgcttttctgacacgtgcagagttttactcttttttctcgggtgaagagacgtaaccatgatggaaaatgagatcccaagactaaaaccagttagatgatgttcatctgcttctaagccagcattctctcacaaaggcttccctttgaggtcttcctgggtgtaggtccttggggaaaacgtgccaagtttctgcacagactgtcccttgtctcttgacaattgaaagttccacggcaggttaaagaaggctctgggtccgggtgcagtggtccatgtctgtaatcccaacactttgggaggccgaggcaggtagatcacctgagttcaggagctcaagaccagcctggccaacatagtgaaaccatgtctactaaaaatacaaaaattagctgggtgtggtggcggacatctgtagtctcagctactcgggaggctgaggcaggagaatggcttgaacccgggaggcagaggtagcagtgaaccgagatcgtgccactgcactccagcctgggtgacagagtgagactctgtctcaaaatcaatcaatcaatcaataaggctctgggaatagaaatgggaaagattctccagtgcgggcaaaggaaagcacagtcctgattaaagcttcctgccagcattaaatgtccgttcattcactgcctcctccatggtgcgatgcgggtggaaaggaagcgacacattcgtctttcttgcaaagagcttgcaatgctgtattctgttgagcatgtaagagtggggagctgtgtgtgttttatgaaaatgtcttttgttaccaagcatagctcttattaaacggcttcttttcttttaaagcctatataacatgagttacatgggcgtttacatcaattttgtgttggtatatagtaaattaccccaaaacacagtggcttaaaacaattgatgtttattatttcacagcatcttttttaattgttgttttttgagacaaggtctcactctgtcacccaggctggagtgcagtggcacagtcatgactcactgtagccttgatctcctggcctcaagtgatcctcccaccttagccctgtgagtagctgggaccacaggcatgcactgccacacctggctaattttttatacttttccgtagagacagggttttgccatgttgccttggcttcatagcatctttgggtcagaaattggtacccagctgagcaaggtgtctgcctcagggactcacataaggctgcaatcaaggtatgggctggggctgcggccatctcaagacttgagtaggggaggacccattcccaagcctgcttttcgcagggtttagttccttgcaagctgttggcggaagcctgccttgattctcgccatagggcagctcgcagcatggtagctggcttccatcagagtgagtaagagagggcgagccagacgaaatcagtcttataacctaatccaggagtgacaccccatcacttttgctatattccatatacttgaagtgagtcactaggtccagcccatactcaagggggggatattgtttgaacacttaagtaccaggacaggggacaggggcaaattagaggggaactcagaggctgcctaccatagcagaacagtaagtttcacttgaagcaaacatatttatgagaatcctaatttatatatatatatgagagagagaggggggaattatctttctcttctttcctttaatgaagtataattcacatattacaaaatgcatagatctgaagtgcatagtttaatgaattctgaaaaatgtgtaggattttgttattttataaaaccctgggccatgaggtttctttaaatgccaaatactatagatttatttacagtgtatatatttatgtacagtgtaaacaataggtgtatttggccaggcacaatgactcatgcccgtaatcccagcacttgtggaggccaaggtgggcagatcacttgagcccaggagtttgagaccagtctgggcaacatgacaaaatcccatctctaggaaaaaatacaaaattagctgggcatggtggtacatgcctatactcccaatgagtcgggaggttgaggcaggagaatcaacagagcctgggagttagagggtgcagtgagccatgattgcaccactgcactccagtctgggtaatagctaagaccctgtctccaaaacaaaacaaaaagatgtatttgttatgtattgcatataacaaatgtccctaaaatgtcgtggcttaaagcaacaccatttattttctcgcagtttctgtgggtcacagttcagctgcgtgcttgtgattgagggtttctcccgggctgcagcccagaagtctaatcatctgaggctcgactggggaaggatctgcttctaagcctgctcatgtgatggcaggattcagttcctcgttgacgttagactggacccttagttccttatggctgttggctggactttgccctcagttccttgccccatgggctccttgcttcctaaaagcacccaagccaagattgcactgtcaggagagaactaccagcaagatcgcagtcatggtcttttatactctaatcacataagtgacaacctgacattttcaccatagtctgttcatttgaagtgagccactaggtccagcccacactcaaggagagactacacaagggcatgagcaccaggaggcagggacgcactgagagccatgtcagatgccgcctcccgccatgtatgatgaaatacactatagacacaactgttttaagagcctaccagttttatgaacccaagtatgtctttttagtagaacatctaaatctagacagctagaagaactacattttataaaaatctgaatattttcttttttttttttgagacagagtctcactctgttgctggtgccagagtgcagtggtgtgatcttggctcactgcaacctctgccccctgggttcaagcgattcttctgcctcagcctcccaggtagctgggactacaggcttgtaccagcatgcctggctaatttttgcatttttagtagaggtggggttttgccgtgttgcccaggctggtctcaaactcctgagctcaagcgatccacccgcctcagcctcccaaagttctgggattatagcgtgagccaccctgcacctggcctgatgaatgatttttaaattgtgactcccctatgctcaaatgagattggatcaaatgtcttctctagcaaataaataattccatagctagaaagatctttggtaggtagtttccttcctcttgtgtgttccctgagctctcctactgacgttttggaatattttcacagattcttgaatactcctccctgccagaggtaaagagcttaactcttatcctcttaagtgtggactagatttcgcgacttgcttctaatggatagaatatggtagcagtgacagtgtgtgacttctgagaatagctgtaaaaggcatcgtagcttcctcattgctgtttttcttggatcacttgctctggggaagcccagcagccatgccgtgaggacactcaagcagcctttgaaggagctgctggtgaggaactgagtcttcctgctgacattgacatgagcgaagcatcttggaagtggatcctttcatttttcaggtaccgtgccagggcctgtgagggaaccaagacgtgtaagacatggcctctcattagtgtttaagcagtagagaaagctggtgccatctcattgttcaggagatgaagtgtgtggccggggtgatccagagagtctccttgaaagtacagtgttgaaccttggactttggggtagaattcagacagggtgatggacagctaaagtggttcagaggctggggtacagcatgaggttattaaaatgatggggctgagaagtacaagacctgtaagtgaagaactgggcaccagacattggcatgaagagaaagaagacacctgtgttcagaagtgagcctgccagggcagagttaagactttttgctggccaggtatggtggctcacgcctgtcatcccaacactttgggaggccaaggtgggagaattgctctagaccagcttgggcaacatcgtgtgaccccgtctctatgaaaaaaaaaaaaaacgagagaaaaaaagttatttctcaaaaaatagccttggacttgttcaaatttggatcaggtgtgaacttgtcccagtggagccatggagcccaggctgtgtgtcagaaagcctgcaataggcttccttgacccagaagatttttagagcctccattaccaatcacgctatgacacgtttcttgttcccattggggcctgtgtttcaaactttgggctggaagagaacattcccgtgactactcacatcatttctattacctacagctcttctcccctgtattgctagtctgcctctaccttttgagatcctactcactctccgaaggtaaggtgggtgacctgttaattttaaaggacttttttttggtggggggcactagcaaataaattaaatctatggatgtgaagggagtttggttatgacatccactgccccattaacagccttgtccttcctcttggcttcccaagctgtgtgttctgttgaagaggaggcctctccttgccccaggaatggatcagccagttgggattatctgttgcctctaaacacttgtagtactgtgttgatgccatcccattgtacttgtgattccacgttgtcaccttaagtagattgtaaattcttttttttttttttttaaagacagggtctcactctgtcgcccaggctggagagcagtggcacgatctcagctcactgcaacctctgcctcaggttctggcaattctcctgcctcaacctcccgagtagctgagactacaggcgcacgctgccatgcccggccaagtttttgtattttagtagagatggggtttcaccctgttgcccaggctcgtctcgaactcctgagctcaggcaatccacctgcctcggcctcccaaagtggtgggattacaggcgtgagccaccacgcccagccagtagattgtaaattctttgaaggcaggtatcgtatctttctgtgcagtcagcacagcattttaaatgcaatgcttgcttatgaagggctgtttttctttctggattgttgcgtgtggcagatggagtgccacgcaaccagacttcttggctacaacacacatgtggcttcttttatggaagttgccacctgcagatccttcaccaccaagaacatgcttttctgtcatattgcagaatctttgtggaggatcctcgttcttccttaacttcctttgtgccacacgcttccccacttcacttgggcacctttgaacagagaagcaggattgctgcctccccaccagtgtaataaatgctctttacaaatgtccctccttggaagtatatcttgtagaaatcctagtttctaacttcatccaagaaatttctagacaacttgtagcctagattatcctttaagagccacttacactactggaaaacaactccacccaggttcttatttgagttacagggacaagaagcctttggattgcaggtttaaaaaaaaattttttttttattgctgagacttctattatgaactaccacagttgacaaactgttagtttccatagcaattttagactgtccttaggtgaagggtttcccttccagttgctatttaagatgtgtggaatccaagaagtcacaaaaggtatttcatgtgtcataccttggcaatgcgtgctactaattatttttttgttcctgtcgttaaatatagagccttctcatttattttgtcaaatgcattttcctctactacttttttttttctttttaaagaaagatgctctgtgaaaaggaagccattcatccatccaggtgagctctggatgggcgagccagccatggggactcctccctgggactggagctctttttgactgagctgcacctttgagcatcgagtttctgtttaccacctggatgctttccattttgaacacatttgggcctttcactgaaaggcactttaaaaattcaaggttttagcatcatcaccaaaaacatctactaaaatatgcatttgtacctggagtcatttaaaacaaatgagttaacctcctgtgctctgagaataatcttttctttcttcttcttttttttttttttttttggtcaagacaatagtcttcatgggcattaggtgacaacagctatgcaatttcattttagtccataatacattatttaaagaggttattgaaaatgttgattcctggagctaaagaaatggaaatatttaaccaaaagaagagaacatttgaagacctcaaagctttcatgagatgtttgaaaggcagttgaatgtggagagggtatgctatctgctatggtctggctctgtttccccacccaaatctcaccttgatttgtatcaagagcaagaacagttggagacaactaaatcatggggggcagtgtttttcccatgctgttctcatgatagtgagttctcagagatctgacagttttataaggggcttccccctttgctcagctctcattcttctctctcctgccgccttgtgaaggacatgtttgcatccccttccaccatgattttaagtttcctgaggcctccccaggcctgtggatctgtgagtcaattaaatctctttcccttataaattaccccatctcgggtatgtccttataacagcatgagaatggactaatacactactacctgatactccccggggaagaaccccacagcatcaggataggggataaggaaagcaatttgggtcaatggaggagcaaatttgccagcagtttggagctgttgatagttggattagatggtttcatgaagttttgagcctctagattcagagaccaagtgaccaccttccccttgcgctgagagggaatttcttcaactggttggaaatggaatgataggtaggatccagaagggctatctaacttgataatttatgtgattgttttctcatttaagggagagaatattatctacagtgtttctgatttttttaagggccttggggaaggacataatgaattattcagagacttctctctgtgaagcaagttgcacagagacagacaacttgatacaaattacgattctaaatttgttagtaatatattttattcatgcactctacttacaatagatttcctgcttgacatttcttagacatatcactcatgatcccacagttgctctttgaatgggtgcgaaacctgtgcaaaaaaaaaaaaagatgtacacagtctaatgaattatgcaagtcttaaaatgtctcaagaaaaagattactcattaggattttcgaatgaataaattcaacataattgttggtgcaactgctctctcatgtaataggtaccaaaatctgattcatgttttatattggagggacgggtacttttctgaagaattttaataaaggcaaataaatgccttttctaggatgctttatagtagagcccacaaaggttttcttcagcaatactatcagtgctgcttttctctccatacttccaaaacctagaattttttgccagtactttttccctgttttcttctgagtggtaaaatccatctgggcagattttctacaggcctgtgagggggtgttagccagagagcagtgttttgagctcatatacagaataggtgcctctggatagaagttccgatcccagtatcctctcccaggccccagttctgcacaggcagaggacaccatccccatgcagtccagacacctgccagcaaatgtactcgtttgctgacatctagggagccttgtgatgcttctgaatactgcccaccgttcccaattgctgaaatgtttaagaactttatagctctagccaatacgggaatagctgtacattcaggaatgctcgtgaaatgtggcagggccttgccctcctaggcttgaggcccaggctcctgatggtcggtttgattggtggcttatccatgcacctgatagttatttatggctacgtgctaggtactgtgcagacaccgaagcataaacatttcccctcctggggcttctggtcttgttgaagagacggacagtcaacatgtatgccaataaatacattatttgtttaaagtcacagtaggtgctatgtaggcgaaaaacaaggagtactggtaaggaataggagaagagggctttgctgggatgggacctttagcagagacttgggggatgtgtgggatcagtgtagggagaggagaggggagcaagccagggagaaaggagcttggccgagggcctagagcacccggggcaaagggggacctggtgcaggctgaggcaggtgagctgagcagaggcagacagggcccagtgcagtgaggaatctgattctcatccagctgcaaaggtaagagttataaggttttaggctaagagtgagatcatcataaagatggccctgactactgcctaggaggagtggagagtaagggggggagggaggacagactgtaagtggaaaagagagaatgtgagaagagtagtggttggcaattgcagttgttttagtccaagatgatgatacccgcagctggggtggtggcagcgaaagcagccgacggtgaaggtctgcatggaggttcggccatggacctgaggggtaatctgccatgcagttcagaatgatgaccctcggaccgggcatgcttctcagttaacatctgatgctgccctactaaaggcaaaacggatggtctaatgcaggcaaactggaaatagtgctggtaagaactgagagcacctgtgcttgccatccccatgcattcgaacaggctgtggcttccctctgggctcaagtggaactgtttggacagtacacatttgaatctgtgacagctcttgcactggactgggaaagttttgggcaaaaggagtccttgaatcagagactcttaatgcagggacagaccttaaaagccctccaagccctccaggccgggcacggtggctcatgcctgtaatcctagcactttgggaggttgaggtggatgggtcacgaggtcaggagttcaagaccagcctggccaagatggtgaaaccctgtctctcctaaaaatacaaaaaaaaaatgagctgggcgtggtggtgggcgcctgtaatcccagctactcaggaggctgaggcagagaattgcttgaactcaggaggtggaggttgcagtgagccaagatcacgccactgcactccagcctgggcgcaacagagtgagtctctgtctcaccaaaaaaaaaaaaaaaaaaaaaaaaaaagctctccagtaccctcatcttagagtttagggaactcaggctcagagaggtttgagttattcatacaaagacacgcagccggtgagtgacagagagaaactgtccaataaggcaaattttttttttaagaattttgaatgatggacttataagtcttcattaagtccttataggatctaatttttataaatcctttcagaactaatttatttaaggattaagccagtcaaaatcccagaacggtttcaagtcaacagcttaaaagtggaatctgaatgttaaccaagatgattttccttgtatgtggacggctgtaattgggccccagtctctcatgtgaaaagccaaacagattcagatctaatgagttctggccgctggggcagatggattttggaatttgctatttatagtgttttcaagtgtcaccttccccttttaataagcactgagctgtgatctggccccaggagcctggagcacattggtaggtgtgctgagggcctcacagccgaatgacttctggtccaggtttggaattgaaggtttaagttgggatgttggctattcctcagaagtgaggatgtgttcttccaaataaatggtgatcaatccctgtgcattggagagctgatgggggtgtgcttggcggagagaggcatacccccagaggcttgaggagggcagttgtatttcacgtgctgaggagagtagtggtgtggttaaatcaggaataaaaaaaaaatatgaagaaattgtcagggagagcttcagctgggcccaaaggaaatcaagaaaagagcaaatgagaatgcaatttaaaatgtaaatacaaactgaaatcaaagccatttctatgaaacatttaagaacattctgtaagtattgctggtcaggaaagcacaaaaaattgtctgtgttttgagcccattgtcagtgtattatttagagggaagttctgatttttgctaaggggttattccgagttgcgaagtggtgtggtgttgggggaagaataccaccaactccaggccagctgctgcatctcctggaatctctgttttctcttctgtaagatgggagtcagggtggcctccatctgatcacactgaattgttgagtgactcaaaggagataatgtaccaaacactttgtaagccctatgacaccgttcaaagtctatttcctcccagctctgttttctaaaatcaggctgtatgttcgaatcacctgaggaacttaagactattaccagcgccaccactggcatttttcattctcttggacagcagaggttttccaaagccctggatgtcattctgctgggcaagtctggctgacggggctctgaggagttggagggcctgtccacccttgcctttgggaaaccagccagccagtggtccaaggagattgtcggctgtcttcccaagtcagcgccatcttccttcctgctcatttcctgtctcccagtttttccctggaacctttccatttaaatatgaattcagctgcagcctgcggggatctgaagtactagcgagttgactgcctgaggaggtgggcctgtggagaaccagagctacagttttccacaaaacatatcattttaaatgattctgaagcctgttaaattacactgatgggattaatctgataaagtggtaacagggtagatgcaccgaaatgatcgctttcacatgctttttaattcagtcaaaattaatgaaagatcttgtgtttacggatggaactggagtttaaaattctgaattcattagcctgttttaatgcataaatctaacttccttgtccgtgtgtgaaactcaactagagtgcagctcgatgctactctgccaagagaacaggcagaaggaagccacattttacccttgaagccgggttagccccgtgccttgatcatgccactgagaatgtatgtttctagtctgaatccttttggctttatgttgtcattcagcgtgtgtcatgtccacacccagggataattcctgtcttagaaataaggtgtatgatccagcaattacacttctggatatagacccagaagagggtctcgaagagatacttgtatgcccatgttcgtagcagcagcaacattcacaatagataagaggtagaagcaacccaagtgcctattgaacagatgaatggataaacaaaatgtggtaactacatatgatagagtgttgttcagtcttcaagaagaaagaaatgctgacacctgctacagtgtggatgaaccctgaagactttctgctaaatgaaaaagccattcaaaaaaggacagatattaaacgattatatgaggtacttggaatagtcagaaatcatggcaagtataatgatggctgctagaggctacagggaaggaggaatgttaatgggtatagagtttcagttgtggaagatgaaagagttgttgaggtggatggtggtgatggttgcagaatagtgtgaatgtacttactgccatacaactgtacacttaaaaatggttaaagtggtcaatttaattatatatataattaaatatatataattaaattatatatataattaaatatatataattaaattatatatataattaaatatatataattaaattatatatataattaaattatatatataattaaatatatataattaagttatatataaaattaaatatatataattaaattatatataattatatatatatatatctcaccacaataaaaaaaaaagtaaaacataacaaaagaatagaggtatctgtaggagctctctgccctaattcagatgagtaccaccctataaatgctggtgaagtctacaggatttttgccagcatggcaaccactgtgctgtccattcttggtcagacctgtagaagggaaacagcagttgtggaagtatgtctcaggcaccctggaggacacctaaggggaaactcatctgacaaggacacagacatttttctaggttccctgagtcttctgtgtggtccatcctaccagctggggttatctgatattccagtgtatgtgaaaataatagctaagttttgtttttttttgttgttgttgttgttgttttttggcagagtctcactgagtcacccaggctggagtgcactggcactatcttggctcactgcaacctccatctcctgggttcaagcgattcttctgcctcagccttctgagtagctgggattacaggtgcgcgccaccacgcccagctaatttttgtatttttagtagagacagggtttcaccatgttggccaggctagtctcaaactcctgacctcagattatctgcccacctcggcctcccgaagtgctgggattacaggcatgaacactgtgcctggccagcttgataaatttttatgcagaatggttttattttattattatttggaagggaatagtggcccttctctctgatttctggttatatacctataactgtagcagctatttcatcctgttagctttttttttaaaaagatattttttagagccattgttttagggttataggaaaatggagtggaaagtacagtgttcccttatacctgcccctctcctcaacagtctcccctcttattaacatcttgcattaattagtgtggtacatttcttacaactgatgcaatattattaacaaaagtccatggtctacattagggttcggtcttggtagtgtatagtctgtgggtttggacaaatgtgtcatggcccgtatccacctttatagtatcatacagaggatcttcactgccctaaaaatcctctgtgctccatcttgttcttccctccctcccatcagcccctgatccttctattgcctccatagtttttccttttctggaatgtcatatagttgaagtcatgcagtatgtagcctgttcagattggcttctttcacttagtaatatgcactttagtttcctccatgccttttcttgacttgatagttcatttctttttagtgctaaatcatattccatcatctgggtataccatggtttatccattcacctattcaagggtatcttggttgcttccaagtcctgtgctcttttaagatttcagtttttgacccttgatgtgacaagatgggaagggccacaaaatatctcattctttttctcctgttgacttagtctgaatactccagactgtgctgacctgtgtggttcagtctaggagccataggctctgtgaggctgttgaacagttgaaatgcggctggtccaaatggagatgtttgtactgtctgtgcagaggtacgttggatttcagacttagtataaacaaaagagtttaaagtatcattaatttcttacatcagttatgtatagaaatgataatttatatcttggattatataaaacatttaaaaattgttgtacttgtttcttctttccttccttccttccttccttccttccttccttccttccttccttccttcctcctttctttctctctctctttctttcttcctctcttccttcctttcttccttttcttcctttcttccttctttctttctctttctttctttcgagacagagtctcgctctgttgcccaggttggagtgcagtggggccatctcggctctgtgcaggctctgcctcccgggttcaagggattctcctgcctcagcctcccgagtagctagaattacatttgcccaccactacacctggctaatttctgtatttttagtaaagatgaggtttcaccatgttggtcaggctggtctcaaactcctgacctcaggtgatccacctgcctcgaactcccagagtgctgggattataggtatgagccactgtgcccagcctctttttaattgtttaatgagactactagaaaactgtaaattacctacagctcacataatgtttctgttgggtggtgcttctgggaaaaagaggaatgcgtggcttttgtccatggtgcctctttaaggatgttattcagctgatgtttctcaggtacctgctatgtgccaagcactgttgaagcacttcagataattcagtgattgaaagaaacaaaacccatgactttgtgggttttagtacattagatttggatattatcaaattattttggcactttttctccacagtagcactactgtttttaaaagaccagtgccagccgggtgcagtggctcatgcctgtaatcccagcattttgggaggctgaggtgggtggatcacgaggtcgggagttcaagaccagcctggccaagatggtgaaaccccatctctactaaaaatacaaaaattagccggacgcagtggcaggcacctgtagtcccagctactcaggaggctgaggcaggagaatcgcttgaacccggttggcagaggttgcactgagccaagatcacgccactgcactccagcctgggtgatagagtaagactccgtgtcaaaacaacaatcaccaccaccaccaccacaacaagaaacacacaccagtggcccaggaaagacaaaggaggctttaggatatgtcccggttctcattctggtcccaacacttattatggatgtaacttttggcagttccttacccgttaagccttggtttcctaaccgtaaaatgggactaagtaattcctctcatagagtgctgcttgtgcaacatggggtcagaatgagtactcaggaagtgattcccactcagcccgcatcccttcctggagcactgcagttttgggattcttgtctccagcccagctcttacagcccctgagagcatgctgagcaggggaaagctgctctaaagttcaatttgcattgtaccttctccatttacatttcttgaccttttgctttctcatccagcaatccccagcagggtgtctgtgttctaaggcacccacctagcctctttctgaattttaatcccagctctggctaaaagcctgaaagcaaaatatgaatcgtagctccacaattataacgtgggactttctttataaaatgaagttgctctagcagaaagccagggctacaaatcagtagcggcttcaggatgcatggcctctttctggcataggaggcccctttttcttctcagtcgcggtgtttcttccaacatctatgcatgttgaagtctggagaaggctgatgctgagagatatgtactaatgaaatgcacaggtgttatctttttctgttccaagtccctgtgtgccctcctgtcttggtgggtggcatggcaggacatagaaacacttggaacctgtttactattttccaaaaaggccttgcctgtagcccattgatctacccactatgtatattcattttaatgctgtttttgagtccgttgactaccccgggaaatcaaagttgactaccacagccctagtcctcaagtgtcttgcctgcaatgaggttacctggcctattagaattaaggactaaaatgcaggagctggggtcacacctgccagctgtttgtgagccctgaagatgttggggatttaaattttagatagatcattgtagctgcaaggggtaggacggataggtggggtatccagagtccttggataccttgtcttcctggaccctctctcagcacccttgggctaagatgcactcttgaacacatttcctctatggcccctttcagatctgctgatgatacctggattccttctttcagagtgacccagccccatcccagggaacgggcagatgggctctgttgcccatctcaaagttcccttactttttttcttttgaggttttatcagtccagaagtggaaagaagatggatgccattagctttagaaatattttttatgttttagggagaaagaagcagagaatatacttttagatgagcacactttaaaataccagtaagacagacttgttggaagacaggcattgtgaagaactgttgttgttttttggttttttttttttttttttttttgcaacagctttccccactttgggaaatgagaacttatgccctcctgaatgttgtatttgatgggacttagatccatgggggaattttattttattttttaggaaaaggtaacctactaagtatagttatatccttctagcatgaaatataatcatttattagaccagaactgtttgttaattcagcagtgtgtcttgaaaaagagccaccctcaaatttaaagtagaaatagattcttcattctacacctttttgacatcagatttgctttcctggtctcagtgcaggtgcccctactgtttggtgtttgggacacagcctccgagtaagtccaaggagagcttggggttaggcagtataggccatgagccccttgccagcctcccagggactttgagaggagctgtttggggcaagatgcttaatgaaaggatgttttgtaatttagagagaaaaaagaaatttatcccatagataactaaaccctcaatgggaatattagaaaatacaattgtcacattatgtaatatttgtacattttccactgcaagtaagaatgcgtcctttccttaattttaaaatatggaaaaggtcgacctttctgctaccgtaaggaaaatcaagggaaagggaggttttatacatgatatggggaacttggtataattatttagctcagtatgaaattctgccacaggaatataaggtaattaatttctctaagtatgaaatgcaatcttgaaaaactaggaaacaggtgccgaggtgacaagataggaagagaagctgagtgttgtgcagtggcaccgaacaacttctggaacattccagagcgtggctttgtagctggagagagcctcctggcttctgtgtggcgaccgagactgacccctgctggcagattgttgctaagccgtggctgttaatgaagcagggcaataaggcccttaagcaggagatcctgccaggccacaggcaggtctgtctccgaggctatgccttgtaccagcccttgatgctgttgcctgaattcccagtgggaagaaaaatggacccagcagtttttagtgttttggtctcagtttccaccatctctcccctttcccagtctgggatgtcagtgtttgctctctcctccctaccctctgttacctcaagatttcatggaaataaaaagccctgctaacatcacaaagaggctgaaaattccagatccacctcggagccagacacttgagaaatttgatgccaaggtaacctgcgtttgggaaaacatccttattaggtttatttaagaacgatttgaaaaattcctataagtgaaaatcagatgggaagaagtccaaaaatctgattcatgccatgactgtgatacaaccaagatcttcgtgagccagtggatggggaagagagataatgtacaatatttctatgtgtttcctggaaaaattcttaaacggattataaaaagcactaagtgtaaaggaaaatgttaatacattggactgcattaaataatagaccagcagaggtctggcgtggtgactcatgcctgtaatcccagaactttgggaggctgaggcaggcagatcacttgaggtcagtagttcgagactggcctggccaacacgatgaaaccccatctctagtaaaattataaaattagctgggcatggtggcacacacctgtaatcccagctgctagggaggctgaagcatgagaatcacttgaaccccaaaggcagaggttgcagtgagctgagatggcaccactgcactccagcctagacgacagaataagactctgtctcaaaaaacccccaaaaaatagatgtgcagagtctttatttgtggtagaggttagtgttttccccactacattttccaccagcttgttctgggagctgcttttgggtgctggtgaggagtaattcgtggtttaggaagcttgagtgcgggtgctgggtcctctgcttgttgctcagcagggtactggaggccaggaaggctggcgctgcagaaatctgtcttcagtgcacttactgctgttgccatggacagctcattcgtatagctggtgtggagctaatgaagtagggatgtttttaaaatgaaattttaaaaatggggtttgagaagtacataaacagttcattgtggcataaaatgacattataatcatttaattttgagatgatttaaaaatcatttcctcatgttccatgttctacagcttaccagtcaggaaaaaggataattttgtgggactcaatgaagtgatgaaattgagaacaaagcctttcatctttggacttacacttccatgttcctaaaagagttaggcagggatatgtaggtaaatcaaagactggaaacgtagggtctttggaaacttttttctgggtcatctttttagtcttaaagctaagccttcagttgccaagcagtggtttttttaatgaatgaggctggtcaataggatatctatattttaaaaacctcaaccacaagtaacaccctacacaaaaaccaattacagatagatagtagacctaattgtaaaacaataaatgttctagaaaatgacagagaacatgtttatgaagttgaggtacaaaataattttgtaaacaggatctaaatagaactaaccctaaaggaaaagattaatcaggcatttttgttaattgaaacatcaaagaatgaaaggtagactggtattgggggaagatatttgctacacttatacctgttaaagggcttgtgtcctgaatttaaaaaaaaggtcaggtgcggtggctcacacctgtaatcccagcactttggaggccgaggcaggcggggatcgcctgaggtcaggcgttcaagacagcctggccaacatggtgaaactctgtctctactaaaaatacaaaaattagccaggcatggtggcaggcacctgtaatcccagctacctgggaggctgagacaggagaatcgcttgaacccaggaggtggaggttgcagtgagctgagaccatgccactgcactccagcctgagcaagaagagtgaaactccatctcaaaaaaaaagaaaacctcctcctacagatcagtaagaaagacaatccagtagaaaaatggggaggagatttgtaaacttcatgaaagaggatataaaaatggacaataaacataaagtgttcaacctgggtcatcaggggaatgcaaattaaaactgcaatgggatgtcaccagcagtcgtaagaaagaataaaatgaaaaagaccacagtactaagtgttggtgaggacatgctcctggtatgcaaattgctataaccactttagaaaactgtcagtattgactaaagctgaatacacactcctgtcagacagcaattcttctcgtaggtggatccccaaaagaaacatgcatgtgtaccccaaaagtcatgcccaaaatgttcacagaagtattattcataattgccttaacctggaaacaactcagatgttcctcacatgtagaatggatttttttgtataatcctatcatggggtactgtgcagccctgaatgaaaaacctgttatgtgcaacaaaagtgtgatgtcttgcagacataacactgagagaaagaacccaggcacagaattgttttctgtatataaaactcaaaaagaggcaacactcatctctagtgcctaggggtcaaggtaaccacatcttgctggggagaagagtgactagaacaggcacaaggggacttctggggctctcgttccattctgacgatggacgggtttgtggatacacaggcgagattatgttgtgagaatccatcaggctgcatattatgacttgtgcatgtaaaacatgtatgctacacctattaaaacgtgtttgttttagaaatgccttcagtatgtacagctatgatagatcaacagaaaaaataaaacactttaaaatttctttaaaaatttttaaaaagcagtgccttcaaacacccaggctattgtgcagcgtgttgctactgtctgtgatgcctgcgaggcatgggtgagaggaggaggcggtgccagtgagtagagtgagatcgtgatattgctaaatcactttcttagggtgtgaaagactctgctttagctctttttcgggcttttctgccatgccttactagttttggcagttttcctattaaaattatatgtaatgtcttgatataactgtgctcgtctggagctgtgtatttaaatagctgtaaacttctcaacccaaattgtgggaattaaatttccattagcagattggcagcataatctggtgggatgttctctgggcccaaagccaagagccctgggttctagttacagcttctagtcctgacctggagcatgtcactcagccatcctccgtgggtacctcctcctgaaaataatattaaatctacatatggaaatcacatccacccacctctaaggttgctgtgaaggtaagggaaggtaatatctgtgagcactgtttgcaaattgcaactgcagagtcataaatctgtttgcataaaccacacattccagaggggttctaatcgtgtttacatatacttcttaaatttcgtactaaatgtctgtagatatgaagatgtgaaaacaaaagctcagtgagaaagtaaccaacagaatggaggaattctggagaagtcctaacatgtagtgttttcccattcctaatccctatcatcttgtggcattgcgtgtacttatttctgtgttttcacattattaactgaccattttggatggttgaatatacaggagaggtgctggttcaggaaataattgtttttttttaatccatatttcaaaagtaattcttgtcggtatatacaaatatgtttaagttttattatttgccttttaacaaattacaacatgccacattaggaataagtttgacacaccttaatcattttaagtcttattatcactaaaatttgcagcattctccttcatggaagaaaaagttaatttggtggaacctttagtcaaattaattggtcagaagaaatactgtatacttaactgaaagagggaaaaaaaccccatgttttaatgaacttaaatttaattgaacaaccttcctcaatcaatgttttagaaattgtttttctcaggaaacaaactattgacctaggcaagtggtttaaaaacttttgtttgacggtagacatatacttttgcaaataaaaccttccacggaacctgagtccgtagagcagataaaagaccactctgaagcaggggtaggagtggagaaggtagaaaaatgggtggtagatcttaccactgagtgttttgcttttgaaatacgaagcctgttggatgccatggaaagccagataactattactctgtatgatagtgcagggaacgttctgtgtgtggttgtgttatgttgacattccatccagtgtgccactccgtataattccgtctgacgtgccactccatataattgggatgctgtctgttcacttagctgatagaggtgggattcagagactgtggtgtctgtgatgctgtgatcctagacatggtaagtgcgtaatacctctagatgctgatagattaagctatgattgaatttatagtttccagaatgaatattgtactttgagaggctataaagaatatcaggctgggcatggtggcgcacgcctgtaatcccagcactttgggagacagaggtgggcggatcacctgaggtcaggagttcgagaccagcctgcccaacatggcaaaaccccatctctactaaaagtacaaaaattagccaggcgtggtggtgggcacctgtaatcccagctactcaggaggctgaggcaggagaatagcttgaacccgggagcaagaggttacagtgaaccaagattgcaccatgacactccagtctgggccacagagcaaggctccatctcagggggaggaaaaaaaaaagaatatcagtaactgagaaaatacgcaagatgaaccacctttccagaaatgttccagttagtcaaattatcctggtaacccacagctcactgcagccttaatctcctgggctcaaaagatcctcccacctcagcctcccaactaactgggaccataggtgcacaacaccatgcctggctttttgatttttttgtagagatgggctcttgccacattacccaggctggtctcaaacttctgggctcaagcagtcctcctgccttggcctcctaaagtcctgggtcatgagccaccccacctggccctgaggcttttctgactaaaatattttaaaatgttatatatttttaaaactagtttttgctatagtatgagatgaatatctgtccccttttgagtaaatttcaattaaaaaatacagagtcctgtaattcagtgataagggagctggggaggcccttactttcaaacctgaagaattacatctgcttcccaagaactgctttcttgggaacttttaaaagtatgtatttgtttttgtgagtttgtaagagctgcgttctgtctacagaggaacttgttaatgaatccctcctcttatgatattttatatagaaatgcttggtttgtgggttgcgcccatgacatacactctgggaaataagaaaattatagacaaaccaaaatagaaagcagctcctctctcaaggtgagttcagcagttgtcagtggataaaaggaccttgtaatgagcagctaagcccacactcctgaaatgccttttcattgcaagagtgaaaacgagagataaaggaggttttttcctgagtaattctagcttgcctagcacgctatgagcaacagatagaggccaactttaaaatctccatgactgaattataccaccaaaacttgtgatcagttcgttttctgctgaaatcaggaatacatgggtcattaatatcaagtagaatagaaaagagaaaagcagtacctaaacgcaaccatcttttttatcctcagttggaaaagtgtctgttttcttctaattataaagatgctgcatgctcattacaggaagttctaagagtatcaaaaagtgtgaagaattaaagattaaccaaaattctgggaaaagattgttataacaatgttgacaggcatttacaacaaagcataacattattctttgacattatgctttgttgttgtttttaacaagctatatctagcttcctattattttcattttgaagtgcgacattcacccatcagaatatacactgaactcataaaaatattccatgtttcaaaagatgaaatacaacctttaaataaacacctagaaaaatggcctccctgggcacaggggtgcatgcctgtagtcccagctcctcgggaggctgagactggaggatcacttgaggccaaagagtttgaaaccagcctgggtttaacacagacccccatctctaaaaaatgaatttattttaaaattttttatatggcccgaagggtattaaagacaacaatgtaaaacaagatcctgcttattaagttaatgaaatcacaacacccagggttgacaagggagccaaaaatggcagtctttttctgtcttatggcctatacgttgatatggtatatttggaaatgaatttggtgatatgtatcaataagctttactgtttataatcttgatctgagaacttcatttttatatttatttgcctaaagaaagactatatttataagggtgtttgtgttgaaatggtcattccagtggaaatggcctacatggaatgggctgtacctcagctggacttcaattcaaatggctgtctgccagctccgagccttggacaagtcacttaacctctaaccctcagtcagtctctatatttttaaatggggacgacaataatccctgtctcagagtgtttttatgaagattacaatgtaatttaatatgcaaagcacttagaaccctgtctagcacggagaaacagcgcagttgtcaccccttctctgcaggggatacattccagggacccccgtggaagcctaaaactccaatagtgtcaactctgtataagcaggttgattatccctaatctgaaaatttgaaatgttctaaaaaccaaaactcagcggtgaaaggaaatccccactggagcatttcggattttcagattgaggcatttaaccagttagcatgaaacagatattccaaaatcaaaaaaaaaaaaaaaatcctaaattccaagcacttctggtcccaagcattttggctaagggatacccaacctgtactatgtttcttatgcattaatatgtctgatccatttataaattaggcacagtaagagattaacaacaataataaaatagaacaattctaacaatatactgtagtaaaagttatgtgaatggggtctctccctctctgaaaatatcatactgttgatgttagcaatctgggcatatgaaatttcacttatcgggaattttcaccttttcacttaaagtaatttccagcttctctttgacatatctgaattgccggtgtcaccactctggtactttagggccattatgaagtaaaataaggattccttcagttcaagccctgtgatacctcaacagtttatctataaccgatggctacgaagagactaagaggcggtagcagcatctacagaaggggtctgctggacaaagggatgattcgcatcccagatgatatagtgggatggtatgagatttcatcacactattcaggattgtgtgtaatttaaaacttacaaattgggccaggtgtggtagctcatgcctgtgatcccagcattttgggaggccgcggtgggcggatcacctgaggtcaagagttctagaccagcatggccaacatgggtgaaaccccatctctactaaaaatacaaaaattagctgagcatggtggcgcacacctgtaatcccagctactcgggaggctgaggcaggagaatcacttgaacccgggaggcggaggttgcagtgagccgagatcgcatccttgcactccagcctgggtgacaagagcgaaactgtcttaaaaaaataaagttgtttatttctggaattttccttttaatatattcagactgaggctgaccacaggtaattgaaactggaaaacaaaaccacacatacagggattacttggaaacattgcctgttaccaccttatgcattggtgtgaggcttgaatggagtaacacctgagggcagtgtctggatagagtaaaccagcattccatgttagatgatattcttagtgttagtattagtacataaaacttagaaacaggaccgggcacgtggctcatgcctgtaatcccagcactttgggaggccaaggtgggtggatcatgaggtcaggagtttgagaccagcctaaccaacatggtgaaaccccatctctactaaaaatacaaaaattagccaggtgtggtgatgcatgcctgtaatcccagctactccggaggctgaggcaggagaagtgcttgaacctgggaggtggaggttgcagtgagccgagattgtgccactgcactccagcctgggcgacacacccagactccatctcaaacaaaaacttagaaacaaatattcatctaataactggaggaaaagcaaaataaatttcagatggaggctgtgctatgaagactgtcacagttggttacaacacagtgttcattgtaaggataccaaatttcatgtgcgcggttgctctaccaaaggatatgtgcatgggaagatgaagtaaaaggagatgtattccacaggtatagtaccagcttccatggtgcctggcaaagcataaagaagcttgggttttggcctcttgaaattaatttaaagcatgagatgggcttaagcccatactatagagaccattaagatgcaggaagagcttgataattctggaccagtctataatttgaaataaatgtattttgaagggccaaagccagtggctctttactgcagcatgtaatttgattcctattggtttttgcaaggtgcttgaggacttttttcatgctgaaatttcatttctgctgttcgcaggacaagagaaatttgatacccatgtacgacttgaccaggcttgaaatttcactttatttgatggttcggctagtcatatataaattagtgggttcaggcttcagtagggaacacacacagagccagcagctgtggcctgttcctgtctcctgagtgaggagcattcacgatgttcttttcacttagagagggcttagggaagatttatgtgttcgctgtctctcatttctgttctcaaacccttgttttctccgtggaaaatggtgatgtactttttttttttttttttttgagacagggtcttgctctttaacccaggctggagtccagtggtgcgatcttggctcactgcagcctccacctcccgggctcaggtgatcctcccaccccagcctcccaagtagctggcactgcagacgatgcaccaccagctaagttttgtatttttggtagagacggggtttggccatgttgcccaggctggtcttgaacttctgggctgaagcgatctgcctgcctctgcctctcagagtgctgggattacaggtatgagccaccgtgcctggccctgtgatgcacttttaatcacagcggtatttggtcaaaggatggcagaataactaggcttgtgggctagggagcatccaggagggacacctggtcttccgtgagagtccggcgatggggatctttgcatccctctctcacattggtcaaggcctcatttctactcctgatgtctactcctgatttgggcctgagaggtgcgagctccctttccagagtagaataagcagatggtgattctgagcaatgtgggatgtggactgcagcctgggcaagggagtcccttgagatgagtcctccatagcagccaggatgccaccctgacttctggctctcctgactcagtccacttttagtctctttttctgcaggccatgaaatagctcagcccctggcctgcttcagacctagagctcagccagcctgcacttcggctctggttacgtcttggagatctgctctgtttctagcccagggaggtgcgtagtttatatggaagtgaactatatctttttaaaaatacatttccttcttttcttttttattgcgtccatgtatttagagctaaaggagaggtccacagcatgagtttatacttcaccttagccagaagtccctgccacatttatccttagatcagagaatgacactggagtgaggacggggtagtggggggtagggagtggggtgctgccctagcctgttcccagatgctgcataagtcatcgttttcaatcctgcatgcttagcttccgacccctgtcaccctgccaccccctcagaagctgccgcacacctgctctgtgccatggaccagccagagtgcagggtttgtgtcatgcgccccctccaccccgtgagctctttctttaacctttctcctgcaactcctcctcagccccctttgaaatgccaaattcagaagctgtgtttcccttcctcagccagctaacgagagactgaatttaaaacaaaacaaaacaaaacaaaacagccctcattgtctccctttgatatttgcctttcatctcgtctgtcccagggtcggggcatccacctaggccagcactctggaaagacgcctcacctgcagcaggtagagcccagcaagtcggtccaggcttccgcacatggtcatgtccccatgggtttgtccacatgggtttgtttgtccttggaaacccttcagctccagggagcctgaagtccttggcgaaggataaagtggaaggggaatgcagcatgagggagtctttctgttcatattcaccacctgaaaattacaatggttcaagcagtgcaccttctagacgaggtggtctcagcaagccttaaaaccatctggtcaacaagagcaaaacatgtataaggccatgaatgtacctggggctggtttggtttggtttgcacaaaccaccccctcctctgagtgatgtataaataagaaagtaaacccatctccctgccaagtcattctaaagaagtagccctgtcttggatgcccatgtttgtcttccacaccctttagtgtagaagacatcagggcccacctctgcatcctgggcctgtggttcctgtcctcttcatccagatctgtgactgtcgtgatagtgtcctaactgaccgcctgtctctctggtcttgtgcctcctcccagccgtcctcgggcccccttgcactgtggatcacgtccccatgccgacactcatctgtttcgacctgtgggtggctccccgcgcagctcgccaggcaggcctctgtgaactgactctgagagtgctctctggccccaccgttgcttctcacctctgcacttgcaagaggctacttgtgcttctgtgcaggctgtggcctcttggggctccctgcatctgtggtggctgctgctttctgctcggagcatgtgcacatgtgcgttccctagtcagtacacagtcagcccctgctgtggcgctggcacacagcagagagcaagagaagtggctttgccccccattgaacagacagagtagtagggaagacagacatcaagctagtcatcacgaccataattacgtaattaccctttgtgacaagagctgtgaagtggcaggaaggaagcagaccagggtcaaggatggccttcctgtggtgtgatgtgtaagctggaatttgggtaggaaataggtggagaaagagcctgaagaaagatgtttccggaacctgcgatcaagatgtgtgaaagtcgtgatgggaaaatgaggatgacggtagcagtgggtaggggtcagaggtcacgcttaccaagggtttaccgtgtcaggcacgggtctgtgttacctcatcacgtcctcatacgacactgcaagaaaggtgcttttaccatccccactgcacacatgtgaaaactgaggcacagagaggccagtgggcatgcctgagctcacgtggctggtagggtggtgggatttggacccaggtagtctgggtcccgggatcaagctgcagtcactgcagcatcttgctgggaccttgaaagaggcctttgtgactggaactgaaaccagggagctaaggctggaaggcagaggcagggccatggagatggtttaggaagtgagtgatgaaatttggatttttatgtgatcagacttggttgggaggacagtggattgaaggagaggcaagggaaggaggcagagagaggaattatacaccgaaggttaaaaaaaaaatcgggggttggacttccctccttctttcacttggtgctttctccttgcccttcaagacctggtgcaggtgtcactctctctcctcggctcactctctttctctgcgccggagatcctcaagatcaggggagatgtctcggcatctctcagggttcctcatgcacaggcggctttccacaaataaatgaaaggaatggagggaaaatagttacaaagctaagaagcaagatgtttcattgggtaatttaacttttcaagttcataactctgatgtgactttcacagtgtaagctgcctgtggctgatactttactcatggagtactagtggtctgttattcaagctaaaatttccatttccttattagcctgagtgaccagcattactcccctagctccacattcttagggagtcaagaggtcgctttcagcaggccaatctgtgcacgacctgctggtgctgcagcattccttactcagatctcagagaccctgggattttgcagtgctttggaaagctgacagggctggcactgggggctggctgggatgggaacaggctgcccctcttggctctccatataggcctgagagccacgtggtcccacatgagacactgagccatgtttgggctccgcctccagggttccacgcattcttagcatctcagcaatccaaggacaaacacatcagcttccccgtagctaaacataagaaagttgtccgtgtttttatataaactttactgacatttaaacatgcatacttcatgaaaagtgcaatattgtcagtgtgcggtaaagtgggttttcgccaactaaacacacttatgatcaaaacatgcccggatttgcacccagatcaggaaacagaacatgacgccaccctgcgcccttcttgcttcccttctgtttactgcactcctcgtgaaggtaacctttgtcatcgcttctaacagcctggattaattttgcctgttttttgggctttctaccaatgggatcatacaatgtgtagagaggatgtaggtttaagatgagatttgttgcccccccccatgctcgatttatcccatgttcctagaaattatagagataacacaagtggaaagacagtctcacagtctcatgacaggaaggttacccatccggggtcaaaccatgcttggcacagagccacttgttaggattcagcagtaattaaaatgactgtgttgtttataaattgttttatgagtgcattagtgccttgtttattttttatcaccagagaaagagtgatcctcctaagtaaatgttctagatcagttgagaaagcaaactttctcagccaagggccagctagtaaatatttttggctttgcaggcgcatatggtcttcgttgcaaccactcaattctgctcttgggatgcaaaagctgtcttggacaatatatgcacaaatgaggctggctgtgctccaaaaaagctccatttgtggacattcaaataggaagttcacataattttcacttgtcacaaaatattattcttccaactttttaaacttgaaccatatttgagagggaatctttctgaagtgttttgttttttcttttttgttttttgtttttgagacagagtctctctctgtcccccaggctggagtgcagtggcacaatcttggctcactgcaccctctgcctcctgggttcatgccattctcctgcctcagcctcccatgtagctgggactacaggcacccgccaccacgcctggctaattttttgtatttttaatagagatagggtttcaccgttttagccaggatggtctcaatctcctaacctcgtgatctgcccgcctcagcctcccaaagtgctgggattacaggcatgagccaccgtgcccggccatctttctgaagtttttaaacactgatctaaattctcaggatgagctgagaacattttcttagtaaatatgggcaacatggtttaataaaacatggaaaccctggcactgtccttttgccgtgtctctttgggcaagttttaacttctctgggtctgtttcatcttctatgggatggggataaaaggaaggacatttagccattagccccaggagagccatgctagttatttgtgaacagaaccccatctgaagagtcacggaggatcctagttggtcagtgtccaggctgtggcagttgttaaatattttgaatatcactctttgtcatgacatcctctctactgaggtcttgtatacactatggccagcatttgcgtcgtgtatagtaattgctgtttctcctcttcccatggaaatggctgtaggcattcttggctaagagggatacttctgtattaactaccgcaactcaaggacttctgtgctacaggtggaatatccttatccaaaatgcctggaaccagatgtgttttagattcagatttttggatttgggatttgatatagtgtggctgtgtccccacccaaatctcaccttgaattgtaataatccccatgtgtcaagggtggtgccaggtggagataatggaatcatgggggcggttccccccatgctgttctcatggtagtggataagtctcatgagaactgatggttttataaatgggagttcccctgcacaagctctcttgcctgccgccatgtaagatgtgactttgctcctcatttgccttccaccatgattgtgaggcctccccagccttgtggaactgtgagtccattaaacctctttcctttatacattgccccatcttgggtatgtctttattagcagcgtgagagcagactaacacaggattctaggcctgtagtttgtgtagttttccattcccctagtggccaccaggatgtgagctgtaccttcacctagcctgcccttaagtcagctcctctaccaactctaccttgctgtttcagattggtaggctgattaaaactctctaaagccagaggaggcctgcattccaccctcagctgagtgtgagccccgtgtgacctaggaagtcagcagcacagactttggggccagatagtctggtggaaccccagcccctgccattgatgttatgtacatcctgggacgtgttacttaccctctctgttcttcagttttctcctctgtgaaatggggagaaatagcacctactgcatagtggctgtgaggattaggtgaattagtatgtgagaacatttcaaacagtccaggaagcactatgtaaatattagctgtcattattttttttgttttcactcaaaacacattacttggttctgatgcttgctagagatagttgaggttcccgggtatatgatctccagattagagaagttacatattaagtgacagatttggtgttgggaggaatctcatgggcatttttttaggatttgattattttctgttgtatctcattgtcgtctttttaatagctgtagacatctaatcctgagctagtgttttactgttctgttactcataaaaattctgaaatgcaggggttaagaatagacaatcaagtcttaagtgctttgcaaaatgaatttattcctttgagaattaaagtgatgtcctgaaggaagtcacagttaatggtcagtttcctttagggaaatattcttgaagaattagagtgctgctctcacatatctttgatggaaaccaaacaactcctgggttaatgtttagttaaatgaaccaaaaaaaaaaaaagtatcactttgcttagttagaagcaaaggaaaatattaattattcgaatggagaaatgtttgaaaatgagaaataattatgttacggtggtgggattacagatgataagtatttttctttttttgaagttgggtaagtatttttctttttttgaagatggatttgccttttaaaaggaaagggggaaaaagcctgaagctgttacagtctgtctctaaactaaattatcttcactgcaatccaacattgtgcagctaagtatcataaaattaagactcacagcctaaaccctctaataggtaagactattctaagacactggtaacacgtctctgaaaagtgctggcgttttgtgctgttagtttcctgggttgattttggtttgagttcacagcagaagtctgttgggtagccagaaaggaagaatcatcacgttgggacacaaatccgagtcctgtctgtcctttgcattcttccttcccccacgtcgtcctggcttggcttcaagcaagtctgtgaggtaaaggttggtggcttagcttcctagggcttctgtaacaaattatcaccatctggtagtttttattgttttggtttttgtttgtttgtttttggcttttgtttttgttttttcgatggaatctcgctctgtcgcccaggctggagtgcagtggcttgatctcggctcactgcaacctccgcctcctggtttcaagcagttctcctgcctcagcctcccaagtagctgggactagaggtgcccgccaccatgcccagctgatttttgtatttttttttagtagagacagggtttcaccgtattgatcaggctggttttgacctccagacctcaggtgatctgcctgccttggcctcccaaagtgctgggattacaggcatgagccaccgtgcccggccaatctggtagttttaaaacaaaagaaatttattatattacagttcaggagcccagaagtcccaaatcaacatgtcaggagggccacactccctccaaagtctcaggggaagatccttcctggcctcttcccactcctggtggcttctgttgttcctcaccctgtgactgcattactccattctctgccaatgtcttcacacggccttcttccctttggctctgtcaaatccccttcgtctttctgaggacaccagtcattggacttgaggcctaccctaaatccaggatgatcttatctcgaggtctttatttaattacacctgcaaaaaccttacttctacatgaagtggcattgttcgtctgggttaatacctgaggttcattgcctcatgccaaggaaatcaaggacactgacacacaaggagtgagtttaagagcaggagtttaataggcaagagaaagaggaaagctctctctctccttcagagagagaggggctcctgagtgagtcttccagttccatggtgaaatgcatggggaggggggggtggtggttaatagatgagcgtggagaggcggtgtctgatttacatagggcccaaatgattggttagataggtgtgccatttacatagtgtaggaagaagatggctgccccaccctaatcttttgttaggcaggtgggttctctacctggccagcgccatgttgcctgcttctttattgcacacctggttgacagaagggaagatggaccctccatgttgaacacgcctgacccccaggtagccatttcctatccgcagagctgccggcattcacccgtgcaagcttccagcttgcttatctatgtctgcagctcgattttacaggctgctctgctagaaaagaaatgatctgggggctgctttttgttaaaacagaaaccttgctgaggactctcttaccctcgctaactgcctaaataatttctttctagttcctgtagcacaaataagattacattctcaggtattggggattaagacttgggaccactccttaagccactgtagctgacctcacagatgtctcagctgaccaccaggcaggtgtttccacccaaggacgcacttccccattccccatggcaccagcaatgtggagtggggagccgcggagcagggagccagcagcttaagtttgaaatccagctcactgttcttgagactggaacctggagggcattattaaatgtctcccagccttggttcctgtcttgtgtaaagtgaaggtgacggtgtctacccctctgggtcacaagaagcatgtgggagaatatgggaaagtagctgacagggtgcacaagttacagcaggaactcaatatgtgtccttgagtctgaatgcagtcatttagggtcctcagtattaactgccttgctctcaggtggatgatgtttgaggattaacaaatctgttgggtgaatccagataaatggggagttgacctttctggatgacacaggttgttgaccatggtttaacatattcaataagttaatataaagagtcttggcagtgcctggtgcggcaaagggacctatatctgtggttgtcattgtcgttgctatggttgccattgctatggcaccataaccttgttgatctgaaccagtagagatgaggctttgaggtggcccctggagatcacagctgaggagccctaagcccacccccagaaatgttgtgaaagtggctgccttctttcctttacctaacttgtgacatccttcagcccaggactcagtacacagtgggccctcaaaaaataggattaactattaactgaaagatcttattccaggtgttcagggaatcagcagaattagcgtgactttctgctaataatatcttcaactgatgtgataagagtagagttctaccagtggccactgcaaaagacacagagcatgcaaaatcctctctccttttatcagaaggaagagcttctccatcctttcaaccttggaccagtaattggtccctttaggagttagtttaagaaaagctatgcatgccttagccagcctgaagtcagacccttaatgggaagctggtgctttattgatgctcagtaacagaacactgctttgagctcaaaataacttctactaagctccttcaacagcttgctccctaggtggctcagtgttttgctgctgtctgaagttgtatatactccagtgaagcttgagtttcttcatggtcatcatccactatcaccagttaatatgggctgaatatccataacatgtcagactcagtcgggatacataaagaagaccctgtacctgcactggggttgtgggtctgagggccattagaactctagatggctgcacagacacaggtgaggctgtggagcaaaggcagagttggtggtgaagggcctatttttaacttttattgccgccatgttgctcctacgatgccattatgaatggtctctgtgagtccaggcagtggttagtgtctactcagaaacctcacaatgtctgtcctcctgggatagaatatgaacagaatccaggtctggggccatggatgttgaacgtgatagtatgtttcctggtatcactaaggtctgatctcttcccgttttcctacagttctatgaacatttctttctaacacaatgttttcttagggctaattttaagttattttttggggactatcatcccttatatccttctccttccaaggtatcccaaagttgatgtgcagtgttactgtacactttttcagcatgtgcaaatctgtctagcttataatctagcatcattttgtgttgttttacattttatataaattgtattacactctacagattcgtttgaaacttgttttctgtccaacctgatagatttgagatttatccatattgatttatgtagatctagttcattcattttacttgttatatatgatgacagtaattggttcgttttcctaatggaggacagctagattgcttccacatttctgctcttttaaacagatatatatatagatagatagacagatagatagatagattgattgattagatagatatagatatatagatatatataacatatatgtgtgtgtatatatacatatatacgtatatgtgtgtgtatatgtatacatatatacgtatatgtgtgtatatgtatacatatatacgtatatgtgtgtatatgtatacatatatacgtatatgtgtgtatatgtatacatatatacgtatatgtgtgtgtatatgtatacatatatacgtatatgtgtgtatctacatatacatatatacatatgtatgtgtgtgtgtgtgtgtgtgtgtgtgtatatatatatatatatatatatatatatatatatatcctgcagtagctcttcttgtgagattctcctatgtgagaattcccctaggtctggggtgtactcagaaggggaactgccagtcatatgtatctttaactttactagctttggcaacttgctctgcaaagtgtctgaaccaatttacattccaccagcagtgttggaggattctacttcctcaaattcttaccaataaatgcttttatcaggttgaccaaaaagattccatgtggctggggtgaaagagcaggtgtttgcctctctgtgattgctgggaaggttaaacaccttttcataggttgattagccatcagtgttgcttcttctgtgaattgtttgtttatatctctagcacctttttcctccttcctgttttggggcatgaggaagagaggtgatgctttactcactgattggtagaaattccttacatattctggatactaattttttgttgatataagttgcaaattatcttctgctgggatttgacattttcataaaatattttgatgaaagaaaaatgagaaatagggaagagcattcaacctttaatagaagcatctgtaaaagggtctatttgttctgctcctgagacaagttggtggtgtgttaaactaatgaatcattacagttcccatatatgcagttatcattacatgagccttttttatttctttctgaggttttattttgctttgctttttttttttttttttttttttttttgagagtttcgctttgttgcccaggctggagtgcagtggcaccatgtcagctcactgcaacctctgcctcccaggttcaagcaattctagtgccctagcctcctgagtaactgggattacaggcacccaccaccatgctcggctgattttttgcatttttgtagagacagggtatcaccatgttgcccaggctgatctcgaactactgatctcaggtaatccacctgtctcagtctcccaaagtgctaggattacagacatgagccactgcactggtcttgctttgcctttttaaggcatcacctttagggacttgcctttgttcttgatggttctccagggtcacttgtttgagactttagtaacaagttgctgataccttaggtaatgatacttacaattacctaagtcccagatgaacgtgaagtctgcccacttccaggtcatgggatcttaagttcttatgacccataaaagacttagactagcttcttgacacctaccagctcatgggtgagtagctcccatcctcccaaactagaagcaattcatttcattacaaacccaccaaaaagcacaattctgtccaccaagagataacggctgttagtaccctgaaatatatcctgttaaactttttctaatacatatgagtatgtgaatatcatataactaaagtgatcataaaatacttattttagattgtaggtttttttacacaatacgtgtctcagaagtcttcctaggttaatgcatacactcctacagtggcagctttaatggctgtgtagtattccattgttatcttgaagattttaaaacatcttttttgttggatatgtggctgatttccatttttttactataaggagcaatctttaagtgaaccttcttgtacatggatgtttgtgaacatccaaaatctaagacctggaattgcagggtgaaagttacactgatctctgcgacttttgttgtataccctacaggtgtttagcataatggggaggggcagttgtctggggctctcatttggaggaaacttactgagcatgaattggggatacgaagatgataagatgatctcactcccttgtgtcaggggctcatggtctagggcagcagtcttcaacctttttggtgcagggactggtttcatggaagacaatttttccatggacccggttgtggtgtggtttcaggatgaaactttccacctcagatcattaggcattagattctcagaaggagggcatagcctagatctctcaatgtgcagttcacaatagggtttgtgctcctatgagaatctcatgccgccggtgatctgacggtaggcagagctcaggcggtaatgcttgcttgcccgccgctcacctcctgctgtgcaccccagttcctaacaggccatggacaggcaccggtccatggcctgggggttgggggccatacactggcagctgggcaggaggcagcaggctcaggacatgaggaaactgaccctaggagggaggaggttggtctccagtttcaggaggtagatgtcaactgcctgaaattctctggagacaatacccctggctcccctctccacacatcagccctctgtctgaatgatataacatgattcccttgactaaaagcacagcccttgctgtatctgaggtgagccacaaaacctcttgcacttcagtctccacccctgttagttgtggagaataatacctgtagcttgctctgcttcacagccatgagatgcaaggcacataatggatggaagagtgctcggccactgtgaagctctgtgtaaatgttatatacacagtactcccaatgccgtcctcagagcgtgcacgagggcgtctgatgaataccagctctcagaagatgttaaagaggatgctggtctggacgtagtggctcacgcctgtaatcccagcactttgggaggccaaggtgtgtggatcacctgaggtctggagttctgagaccagactggccaatgtggtgaaactccatctctactaaaaatacaaaaattagctggacatgatggcgggtgcctataatcccagctacgtgggaggctgaggcaggagaatcacttgaacccgggaggcggagattgcagtgagccgagatcacgctactgcactccagcctgggcaacggagcaagactccgtctcaaaaaaaaaaaagtggatgccggtcctgaaatgagacctcccttctgaaccggagtgtggacagcccaggaacccaccgccgcagcttaaaatcctcagctgaacatcactgggggagcacatgggctctgcttgcttatggcctgggttcaaatcccaggcctgccatttccagctctgtaacctcagacaagtgactcaaccccctgtaccgcattttccacatctgtgacatctgtgacttggtgtggtcaatgctcaatacatgtaagcttttattattgttgttgttgtttacaactttttgttgttgttgttttaaagacagggtcttgccctgttacccaggctggaatgtagcggcatgatcagggctcgctgtagccttgacttcccagcctcaagcaattgtccttcctcagccccacaagtacctaggactacaggcgtgcaccaccatgcccagctaattttttttttttttattttagtagggatgaggtcttgccgtgttgcccaggctggtcttgaactcccgggctcaaatgatcctcccactttggtctcccagggtgttaggattacaggtgtgagccactgtgcctggccatatttgcagcttgttaatacttacaaggaaactgttagaacagaaaaagaatcattccctcagccatttaaaagcatcctaaaatcaagttcttgttttaagatagttttcattcattgttctggtacttcctaaatagtttcttcccagtaaaagtgcccccactttggtggtttaattataggccatgaggatttgctttttccgtgtaaggttggaagaaaaagttggtttgctgctataggaaatgagtagaagctctgttgccctcgacagccttgtggagttgtcctggaagcctatgtccagagctgtctcccaggtcatcctattgctgcactatggccgactcccatgcagagagggtccttttataaaaacctaaacataaccatgttgagagagcagtcatccctgccgaacctttgctgaagccagttgcctttgctcttagatgatctttgtgcatccaggggttctagaacgttagacccaagagtgtctggtcctagctttgggggtttcttggcctaggatgcaatattttaatggataggatcaacatcagagtaaattttaatttttctaaataaagacattattaaaagttaccagctgagctctgtggttcatgcctgtaattccagtactttgagaggccgaggcaggcagatcacctgaggtcaggagtttgagaccagcctggttaacatggcaaaaccccgtctctactacaaatacaaaaattagccgggcatggtgctacatgcctgtagtcccagctacttgggaggctgaggcaggagaatcgcttgaacccaagaggtagaggttgccatgagccaagattgcaccactgcactccagtctgggtgatccgtctcaaaaaaaaaaaaaaaaaagttaccattggccaaatcaccattttatcaaagaaaagtttatttttacacccaccctcctcaaaaaatagaaaaagaaaggaagcaaagacataagcctggtacatttccaaagactatataaattaatttcatgtaaaacttcctcctttgttcttgtttttcgccggtgcgtccaaggaatcacagacttcatgtacacaaagaaaaggagataagatgacttggtctgagtggcgtggtagatcacactcaggcaagactggagcatgaacggttctcctgaaaattccttctaggctgctagtcagtgagttgtttaaactgactccaatccttttgttgtgcagatgcaaactgtgatgcagttgaattatgtgatttgttttctaaattgttcataaccaaaaaacatcgattcatttttatttatttattttttattttttgagacaaagtctcgctctgtcgcccaggctggagtgcagtggcgcaatctcggctcactgcaacttccatctcctgggttcaagcgattctcctgcctcagcctcccgagtagctgggattacaggcatgtgccaccacactcagataattttgtatttttagtagagacagggtttcaccacattggtcaggctggtctcgaactcccgacctcatgatccacccgcctcagcctaccaaagtgctgggattataggcatgagccaccgtgcccggcccaattcattttattaaataaagaaacatttatttagagtttaaatgtctgatcttgaggttgcgtcagggtgaagactaagctgctgtaataaagacatatgaaattagtggctaaggaaagagagaagtcggtgtttcctcccatgtagcagtccttggtggggtggcatggctccatgtggtcattcagggacctgagctgcttccatcctgatgctctgttgtttttcctgagtgctttcctggtttgcttggtggaagctggattgctactgtgtgtgcatggaagtggaggaagaggatgaggcaccaaagctctgtgtcttgaggccaagacccataagcatcacagcactctgtgcacagcccactagcccaagcccagtaaagcagttgcatataactgcaagagaggcaggcaaatggagtccccagctggaggccacatgcacagctgaaacttgggggtggagggaggaggggttcctatcactaaaagaagaggagaatgactacttggggacaaagagcagattctttgtcatggacatgaagatgtttttaatccattctttctgtctagcagaatgggaaaaggaaacccctgcttctagaactgttccaatgttctgcccatcttgccagactctccctatatttggagggcaaagattcaggcagacatctcttggtgtaaaagtaaatttatctggctgggtgtgggggcccacgcctgtaatcccagcactttgggaggccgaggcagatggatcacctgaggtcaggagttcatgaccagcctggccaacatggaaaaaccccgtctctactaaaaatacaaaaaattagccaggcatggtggcggctgcctgtaatcccagctgctcgggaggctgaggtaggagaatcacttgaacctgggaagcagaggttgcagtgagctgagatcgcaccattgcactccagcctaggcaacaagaatgaaactccgtctcagaaaaaaagagtaaatctatcccacattggtggtttccctgaaggtctggtacaatggaggattccaagcctttctctttttcccaaccatggctcttccactggagtatttcacagggagatccaaggacactgtgggaagaagatcttggatccccaaagcccaaatctgatcgcgttgcccagtgttagtgatgacagctcttcctggcatatgttggttgggtggggtggtctaaggactgcaggatgttttagagcctaaatttaccaactttcggcccctgcttgatgatgctcaacagaacgaacaaagctgtagattacttgtccagatggcctctttatttttagattggtgatcagtttccagcgtctctttatttcttcaccatgatggtctgaatgatgacttcaatgaagggcaaactcaggcactctaggaaagatacattactcagcgtgttattgcctgacacgttctgggaaatcacaggacaatcatcttcatgtgcaacatgtgggtttttttttaatttatttgtttgtttttggcacatttacagttaaattccccagatccaagaaaatgacttcccagttcctggggaaaataaattacgaatggagatggaacccagctcctctctaccacacggggcccagaacatcgtgttctctgctgcaaaactgcatagatcaggttggccacagaactgcaggtgcctcactgatccacattcctcagttaaggaccaagatagaaacctttatatatactctcactgagggaattaattaatgtctgtgttagtttcctagggctgccataacaaattgccacatttcggtggctgaaaacaatagacatgtattctctcacagttcagggaaccagaagtccaaaatcaagagactggcagaaaacaaggtggttccttccatcccatgactccctcctagtttctgctggtgttcagcagtctttgccagtctttgctttgacgatgcattattctaatgtctgcccctgtcttcacatgaccctcttccctgttcctccaattttcaaatctccttcttcttttttaaaaaattatagataagatctcactctgttgcccaggctggagtatggtggtgtgatcttagctcgctgtatcctcaaactcctgggctcaagcaagcctttcaccttggccccccaaaatgctaggattacaggtgtgagccactgcacctggccttccctcacttttctttcgcaagtacatcagtcgttgaatttagggcccatcctaaattctagatcaccttatctcaagatcctcaacttaggtatatttgcaaaaactctattttattttcttttccttcttttttttttttttttgagacagtcttgctctgtcacccaggctggagtgcagtggcgcaatctcggctcactgcaagctccgcctcccaggttcacgctattctcctgcctcagcctcccaagtagctgggactacaggtgcccgccatcaagcccagccaattttttttgtatctttggtagagacagggtttcaccatgttagctaggatggtttcaatctcctgacctcgtgatccgcccgcctcggcctcctggattataggcgtgagccaccacgccctgccaaatttatttattttcaaataaagtcacattcacagataccagggattaggacttgggcatgtcttttcaagggatgcaattccacccactacaatatcatagcaaacgtgcatcaaaaaggttaaatctattaccaccgatcccatgttgtgttgactgcaaaggcgtacggcatcaagccttggaaatgtaacaggcccatttttcgcagttggaaaatcagaagtgctagaaagagagctggctcatcctgtagggatgggtggtgggtcgcctcaggccctcctttcattcccagggaccccgtttgcacagctgcgtgtggagccggctagcacgttgtcagcaacacttctttccgtgtgcttgctcccttagtctctgtaactagcaggtggttgtggtgcctgtcattcatctcccagggctggcttgataaacgttattatacttcttgatgggtaccttctggcgtatttaccgctttgtaactttgctgtttattgtggttccttggagcccaataaaagcaagataagaaaaagcaagcaagaacagggcaggaaaagtcagaactgtaatttagtcatgtaaggttcaattggatgcgtttttcctttgcccccctgccttcaccgctgggctgttcagagccaggctctgctccacttcatccccatcccagtgacattacaccctccacatccccatcctttctggagtgatcagtatcttcttcagtgcatgatggaaaggggaagattttagttcatatcagatgttcagaatctttgtaggaaattgaaaaaatattaaacctttttttttttttttttttttattatactctaagttttagggtacatgtgcacattgtgcaggttagttacatatgtatacatgtgccatgctggtgcgctgcacccactaacgtgtcatctagcattaggtatatctcccaatgctatccctcccccctcccccgaccccaccacagtccccagagtgtgatattccccttcctgtgtccatgtgatctcattgttcaattcccacctatgagtgagaatatgcggtgtttggttttttgttcttgcgatagtttactgagaatgatggtttccaatttcatccatgtccctacaaaggacatgaactcatcattttttatggctgtatagtattccatggtgtatatgtgccacattttcttaatccagtctatcattgttggacatttgggttggttccaagtctttgctattgtgaatagtgccgcaataaacatacgtgtgcatgtgtctttatagcagcatgatttatagtcctttgggtatatacccagtaatgggatggctgggtcaaatggtatttctagttctagatccctgaggaatcgccacactgacttccacaatggttgaactagtttacagtcccaccaacagtgtaaaagtgttcctatttctccacatcctctccagcacctgttgtttcctgactttttaatgattgccattctaactggtgtgagatgatatctcatagtggttttgatttgcatttctctgatggccagtgatgatgagcatttcttcatgtgttttttggctgcataaatgtcttcttttgagaagtgtctgttcatgtccttcgcccactttttgatggggttgtttgtttttttcttgtaaatttgtttgagttcattgtagattctggatattagccctttgtcagatgagtaggttgcgaaaagtttctcccattttgtaggttgcctgttcactctgatggtagtttcttttgctgtgcagaagctctttagtttaattagatcccatttgtcaattttggcttttgttgccattgcttttggtgttttggacatgaagtccttgcccacgcctatgtcctgaatggtaatgcctaggttttcttctagggtttttatggttttaggtctaacgtttaaatctttaatccatcttgaattgatttttgtataaggtgtagggaagggatccagtttcagctttctacatatggctagccagttttcccagcaccatttattaaatagggaatcctttccccattgcttgtttttctcaggtttgtcaaagatcagatagttgtagatacgcagcattatttctgagggctctgttctgttccattgatctatatctctgttttggtaccagtaccatgctgttttggttactgtagccttgtagtatagtttgaagtcaggtagtgtgatgcctccagctttgttcttttggcttaggattgacttggcgatgcgggctcttttttggttccatatgaactttaaagtagttttttccaattctgtgaagaaagtcattggtagcttgatggggatggcattgaatctgtaaattaccttgggcagtatggccattttcacaatattgattcttcctacccatgagcatggaatgttcttccatttgtttgtgtcctcttttatttccttgagcagtggtttgtagttctccttgaagaggtccttcacatcccttgtaagttggattcctaggtattttattctctttgaagcaattgtgaatgggagttcactcatgatttggctctctgtttgtctgttgttggtgtataagaatgcttgtgatttttgtacattgattttgtatcctgagactttgctgaagttgcttatcagcttaaggagattttgggctgagacaatggggttttctagataaacaatcatgtcgtctgcaaacagggacaatttgacttcctcttttcctaattgaataccctttatttccttctcctgcctgattgccctggccagaacttccaacactatgttgaataggagcggtgagagagggcatccctgtcttgtgccagttttcaaagggaatgcttccagtttttgcccattcagtatgatattggctgtgggtttgtcatagatagctcttattattttgaaatacgtcccatcaatacctaatttattgagagtttttagcatgaagggttgttgaattttgtcaaaggctttttctgcatctattgagataatcatgtggtttttgtctttggctctgtttatatgctggattacatttattgatttgcgtatattgaaccagccttgcatcccagggatgaagcccacttgatcatggtggataagctttttgatgtgctgctggattcggtttgccagtattttattgaggatttttgcatcaatgttcatcaaggatattggtctaaaattctcttttttggttgtgtctctgcccggctttggtatcagaatgatgctggcctcataaaatgagttagggaggattccctctttttctattgattggaatagtttcagaaggaatggtaccagttcctccttgtacctctggtagaattcggctgtgaatccatctggtcctggactctttttggttggtaaactattgattattgccacaatttcagagcctgttattggtctattcagagattcaacttcttcctggtttagtcttgggagagtgtatgtgtcgaggaatgtatccatttcttctagattttctagtttatttgcgtagaggtgtttgtagtattctctgatggtagtttgtatttctgtgggatcggtggtgatatcccctttatcattttttattgtgtctatttgattcttctctctttttttctttattagtcttgctagcggtctatcaattttgttgatcctttcaaaaaaccagctcctggattcattgattttttgaagggctttttgtgtctctatttccttcagttctgctctgattttagttatttcttgccttctgctagcttttgaatgtgtttgctcttgcttttctagttcttttaattgtgatgttagggtgtcaattttggatctttcctgctttctcttgtaggcatttagtgctataaatttccctctacacactgctttgaatgcgtcccagagattttggtatgtggtgtctttgttctcgttggtttcaaagaacatctttatttctgtcttcatttcgttatgtacccagtagtcattcaggagcaggttgttcagtttccatgtagttgagcggctttgagtgagattcttaatcctgagttctagtttgattgcactgtggtctgagagatagtttgttataatttctgttcttttacatttgctgaggagagctttacttccaactatgtggtcaattttggaataggtgtggtgtggtgctgaaaaaaatgtatattctgttgatttggggtggagagttctgtagatgtctattaagtctgcttggtgcagagctgagttcaattcctgggtatccttgttgactttctgtctcgttgatctgtctaatgttgacagtggggtgttaaagtctcccattattaatgtgtgggagtctaagtctctttgtaggtcactcaggacttgctttatgaacctgggtgctcctgtattgggtgcataaatatttaggatagttagctcctcttgttgaattgatccctttaccattatgtaatggccttctttgtctcttttgatctttgttggtttaaagtctgttttatcagagactaggattgcaacccctgcctttttttgttttccattggcttggtagatcttcctccatccttttattttgagcctatgtgtgtctctgcacgtgagatgggtttcctgaatacagcacactgatgggtcttgactctttatccaacttgccagtctgtgtcttttaattgcagaatttagtccatttatatttaaagttaatattgttatgtgtgaatttgatcctgtcattatgatgttagctggtgattttgctcattagttgatgcagtttcttcctagtctcgatggtctttacattttggcatgattttgcagtggctggtaccggttgttcctttccaggtttagcgcttccttcaggagctcttttagggcaggcctggtggtgacaaaatctctcagcatttgcttgtctataaagtattttatttctccttcacttatgaagcttagtttggctggatatgaaattctgggttgaaaattcttttctttaagaatgttgaatattggccctcactctcttctggcttgtagggtttctgccgagagatccactgttagtctgatgggctttcctttgagggtaacccgacctttctctctggctgcccttaacattttttccttcatttcaactttggtgaatctgacaattatgtgtcttggagttgctcttctcgaggagtatctttgtggcgttctctgtatttcctgaatctgaacgttggcctgccttgctagattggggaagttctcctggataatatcctgcagagtgttttccaacttggttccattctccacatcactttcaggtacaccaatcagacgtagatttggtcttttcacatagtcccatatttcttggaggctttgctcatttctttttattcttttttctctaaacttcccttctcgcttcatttcattcatttcatcttccattgctgataccctttcttccagttgatcgcatcggctcctgaggcttctgcattcttcacgtagttctcgagccttggttttcagctccatcagctcctttaagcacttctctgtattggttattctagttatacattcttctaaatttttttcaaagttttcaacttctttgcctttggtttgaatgtcctcccgtagctcagagtaatttgatcgtctgaagccttcttctctcagctcgtcaaaatcattctccatccagctttgttctgttgctggtgaggaactgcattcctttggaggaggagaggcgctctgcgttttagagtttccagtttttctgttctgttttttccccatctttgtggttttatctacttttggtctttgatgatggtgatgtacagatgggttttcggtgtagatgtcctttctggttgttagttttccttctaacagacaggaccctcagctgcaggtctgttggaataccctgccgtgtgaggtgtcagtgtgcctcccagttaggctgctcgggggtcaggggtcagggacccacttgaggaggcagtctgcccgttctcagatctccagctgcgtgctgggagaaccactgctctcttcaaagctgtcagacagggacacttaagtctgcagaggttactgctgtctttttgtttgtctgtgccctgcccccagaggtggagcctacagaggcaggcaggcctccttgagctgtggtgggctccacccagttcgagcttcccggctgctttgtttacctaagcaagcctgggcaatggcgggcgcccctcccccagcctcgttgccgccttgcagtttgatctcagactgctgtgctagcaatcagcgagattccgtgggcgtaggaccctctgagccaggtgtgggatatagtctcgtggtgcgccgtttcttaagccggtctgaaaagcgcaatattcgggtgggagtgacccgattttccaggtgcgtccgtcacccctttctttgactcggaaagggaactccctgaccccttgcgcttcccaggtgaggcaatgcctcgccctgcttcggctcgcgcacggtgcgcacacccactgacctgcgcccactgtctggcactccctagtgagatgaacccggtacctcagatggaaatgcagaaatcacccgtcttctgcgtcgctcacgctgggagctgtagaccggagctgttcctattcggccatcttggctcctcctccaaaaatattaaacttaaaacaatttcttcttttaaaatatgtattatgagggatgttgtagtatagccactgtagaatgagagaaaatattatacagatctgaacatgtagcaggcgtggagcgctcaggtttcacgggtggccttggaggttctggctctgatgctacagagacagccaagtataaaggggtccctgagaacctccaacctggcctgtgcactgggaggagtgtgcgctgtgggggagccatggaattttgtgctgtctgcagtgggaaggagcttggcctctcctcttccggggcggtaaccggggattcagtctgtgaggcgggaagcccactaggaggactctcactttgctgagtctctctttcccttctttcttcttcacccaataaaccctgtccttctcacccttcaaagtgtctgtgagcctaatctttcatggtcatgtgacaagagcccggcttttagctgaactaaagagaaagccttacagcactaccatccagcgtcctcctccttcctgccctggattctttagaaatgactggaaactctctccagaaggtgttttctgtgatggcataaatggatcactggaggcccagggccagtgctctctctctgctgtgcttccttggaattctggcccccagccctttcctgaacgcgtcatctccttgagggtaaaaggagccagagaacactatcatcgcagatgcttcatgtgaattgttccatttttaagacaaaggacgacagttggccttaaaaataaatctcatttgtgtttcttttggttgtggagaagtaaagaattttcaaaacgggtcctttttatatacaaacgtttgtctaaatagagcatctttagatcttaaaatgaacagcaaagcgagcactcggagatgcttctgttgtgggctttggtagacagagagagaggtgaaggtcccttctatgcctttttctctttcaaatagttgtttttattgtggtgaaatatccatagcataaaatttaccacttttaactgtggaatgtacagtgtagtcaggtttagcaccttcataatgtcatgtgctcatcaccaccatccatctccagagcttccttgtcctccctgaatgaagctctgtactcatgaaacaccagctcctcattttccctcccctccagcccctggtaaccaccattctaccttctgtctctatgaatctgactgctccagacacctcacataagcagaatcattcagtatttgtcattttgtgactggcttattatttcacttagtatgaagtcctcagggttcattcatgtagtcacatgtgtcagaattttattcagttttaagactgaatagtatctcgctgtatggatataccgccctttgtcgattcactcatcaatggacacttgagttgtttgcaccttcccccgcttcccactgaagccttcctctccatcagttcccggctgtcgctccctgcctctccttggtgatcgcctctggaacagaattttgctgttaggagccactcctgtcaacaggatttcccagagtgtgttaaaagaaaaagcaaatggataatagctctaaataagaacttgctttgggtaagctttggtgacatctgcaagaaaaaaaaaagtggcctgggaaacagggagggttcctggcataataaacattttcttaaacctttatgcaaatcccagattagtagatattgcgggagtcagtttctaaaagaaaacttgatttccgaaggccatgcacagttattctgtttctccatgtgttttgtttgtaagaggaaaacagtggaatagagaatgtttgccacagccaaggttttctctagtccctttggtaggtggaaaccaagtgctggatgaaattgtgtctggatgctgaataaagacatggtttgctgaattcattttggcagcatacactgaggacaaagcaccagtgtacaaccacactacttaattaggattctctgaagacatgccaatagcatctgctcagaagtagtgctgcaaaaagattagtcttgattttgagtatgacttgatttagccagatgcataggcccacttctttaaaagaaagtccaaatttatcttctgtgttctttgagggagtgacaacctagaatcagcttgaaacataaaatgtgcaaagtaaaatttttacaattatgattgcacttctaggatttagtaaacctttaaccaccaagagactggacttgggggtgcgttgcctgtgataggatgccaagttgtttcttggcagaaacatggagattgttaaaccaggatggtaaagagtgactttgtctgtgtcagctactctgaagctatccctgagtcccctggaagacataagcatcccttcctccatgaccccaaggctccttgtgaataataccacattagagcacttgtcacgtcatggtggaattttcatgtgtacatggggtttcatgtacacacgtgtgtatgtaaagggcacagactgcattgttttattccaagcatggggccaatgtattgcagtaacaaggacaaccttttattagatggctactgatcacagtgagaaaggcattagcaccatttcacaactgaggaccaagtagtttagaattccctctggtcactcaactcataagtggacccatgagacctgtgggactccaaagctggtgcttttctcattagaacatgatttccatgttggtgggaatacaccatatgtctcataaaagagttaattatcaaaatcacaatgacattcttcacactcactgggatggccatgatcaaaaaagataatagtaagtgttgatgaggatgtggaaaaattgaaaaccttgtaacttctggaatgtacattggtacagctcctttggaagagtatttggcagtcactcaaaaagttaaagttgccataagacccaacaattcctcttctaggtatataccgaagagaatgaaaacatatgttcttacaaaaattaatacaagaagggtcatagcagcatcattcatagtagccaaatgtccatcagctgatgaatggctaagtaagtgtgatatattcgtgcagttgaacatgattaggcaacaaaaaggaatgaaatacaacacatgctgcaacatagatggacctcagagacatcctgctccgtaaaagaagccagacgcagaaagtcacatattgtatgattccatttatgtgaaacatccagaataagcaaatctgtatagacagaaagtaggttagtggttacctagggctggggatggggagcatttgaaggggattgaggaggaactgctaatgactttgaggttcctttttgagatgacaaattgtgataatgggagcacactgtattaaaaaccatcgaactgtatactttaagtagatgaattgtctggtatgtgaattgtatctcaaagctgtatataaaaaataattaatgaggccagatgtggctgctcatgcctgtaatcccagcactttgggaggctgaggtgggcggatcacgaggtcaggagatccagaccatcctggccaacatggtgaaaccccgtctttactaaaaatacaaaaattagctgggtgtggtggcacgtgcctgtaatcccagctactcgggaggctgaggcaggagaatcgcttgaacccgtgaagcagagattgcatgcagtgagctaaaattgcaccactgcacttcagtctggtaacagagtgagactccgtctcaaaaaaaataataaaatgaagttaaaccaaagaaataccaggagacagtaacattaaagaagtctgaaagagctcatacgaatgtataaggaccccagtagataaactggcaaaataattctaaaagagagcttacagtagagggaatataattaccacacagacaaatggaaaacattctggttctttaacaaagatattaaaattagaaaaataaagtactgtaatatttctcacatatttaattagcaaagcattttaaaaatgattatcaattgctgggaaagagagcaatatttttctatgtttcaggttatatcgtaaattgatactactcttagaaatcagtggccatatatatcaagagttgtaaaacatttgtggctattctatttttagaaatctcttctaaaacatacaaaaatataaaaatgaaagactaatgatgcaaattatgactcatttatgtggtcatttaaaaattagaaaaataaaaattcagttactaagattttaaagttatatgtactgtaagtataacttacagtaaaaaacaggcaagtttaaaattactgaaaggaaataattaaaatgacccagcgatggagttgtggtggagttctgggaaattttttcatttcttattttgtaatgcaattacttttaagttttaaaacatttttataaatagaccttatatttctaagagttatgcttcctagaatattaagtttttgcagattatttcaatcggtaaaaatcaaaagatgccggctctcttggctgacctttaaattaaaatactaatgaagcatttattaccataagagaaaaatatgcttaaaacacctttcattaattgtacttttgccaaaccactctagagttgaatgattctctttctttcccaatttacatagttctgtgggaaaaaatcggacatacagtgagttaagtggagaattgttgcaagcaagccatgaactgccttttaaaagcttgtccttttgaggggaagagacatggattctccacttcatcccctcagttaaacaaaaatctgagccttgcatatttaaagataaaaatatacttaatttttaaagttattgttttggtccagtttagaaaataccacctcattttctcctcccttatgtcttgatattgatcccaaagaatgtgcgtcaaactaagaaagttaattttcatgtagcaacatctggttccttagccaattcagggaactcttgagtgcttatgctcagagcttttgctgctgtttctagattccaccctctgttagcttctcacaagcagtccggtatttggtagagtgtggggggccgggggctcatgaagtcagattccaacgtgcagggtttgtttgagatgcctgtaggatcaaccaggtttcacctctggatgtatgtttaattcagtggacgttgtcattttgatggcacatacccttcagtaaaaagaggttaaaagtattctaaaatgaggtggtggattatctgtttgggtagctacatggtctctgaagtctcttccattttaagataaaattgccaaagacagtttttacaagtttggaactttctgagtgggtgatacgcattagggttttggtggtgctgattattgcatccagaggttggccctgacttctgtcgtctgctggtcttggaatacattgaagcacaccgattggagcacaccgactgaagcacaccgattggagcacaccgattggagcacactgactgaagcacactgattggagcacaccgattggagcacaccaattggcttttgcttttggagcttggttattgtgcagtgttcccacttacctaatcatcactttgttggtggtggagtggagggcctcactctggttccaagcaagtcattagaatgatctacaatttgcagttctaaaatcaggaaaacttggggtttctccaaagcctgcattaaacagaactttttctttcttgaaggtccagatccatacttaaattttacttaaattttaatgagtaatattttcccatcagtggcctaacgcactataaattatgtatgctgcacattaaattcatttttattttttcacaaactggacttaatggcatttgttgttttgtataccctatacgatagaaatttgttgctgaaaaggaattcaggggtcctccagatcactggtttccaaacctgactctttaggaagaaaacaaacaaaaatcctccagtttcgttatggacgtgatgaatgagacacccacggagtatggcccaggaatctgttctcataaaggtctccaggaaggttgggaaggaggagggaagagcgtagagctattctccctgaaaagaaataggccaagagttgattgttgtgttagctggtaatgggtacttagggatccattattctctctgctctttgcatgtatttgaaattttccataatgaaaagacttttaaaaaagattaaataacagcttcccaggtgatcctgaaaatcagccaggtttgggcagcacaatcaatccgcctctcccccttaacaggtgagaacaggaaggcgaacgaggccatgcagtttgcgtgaatgaagaactcatataggatctagaactcctgtttctgccccataggcctaagcccttaactcctcatggcctcctcagactaatcattttgctgaccttcttagcattttaaaagagaattaataaatctgacttgtatgattcacttacttttttttaaacacagaggagtgttgagtgtttttgagatgtttttctttcttcacacatttttctaagatccttttaaacccattccattggacttcaaggtagctattggcttttcaaacataggttacggggctactactttgccgctagttagtgtgtgaggccactggtaaatgaatgaatgaatgagcagtaaaggtgctgaaaagtgtaatgcgtgtctatatgaagcagtgtctattgagcaaaccggagagaccagctccatcctggaaaattaaaacaatggtactgtgactttgcctattgccaatcatcgatcagtcctgtcggtctgacttaaccttctaaagctctttaccacagtgtatagataagttgcctgtcatgtaaatatatcttattgattttgtcaggcagctggccagttttcttaaaaatgtgtcaaattgtctgaatgatttgaccagaaaccccgagagtcaacgtgaggaggaaagaaagaggaagggaacggggaaaaaaagggaaggaaaaagacaaataccacctaattgagactaaaggaatgatcactggggctaccatggcttttgtttggttttggcaaggctttattttattttttttttactgtcagtgaaaacaagaatttgtattgcaggaaaaacaaactaacaagtgttttttcctactgtactctcaacacaaagtgcttctggtcaccaaaatgtggagagatgttgccccccacccacacacaaagcaactctccagcagacaccaaccgggtgtcctatagttcagtgtaattctgagattatctacctggagatagcatcaggtccgacaagataagggttcagtcccacaacactgccccccaccatccctgcttcagacactactcataagtacaggttacccatagctgatgtccaatttagctacaaattgacccccttttagggttctcttgtttgctaggacagctcgcagaactcaggaatgcacgttacttacatttaccagtttattatcaaggatattacaaaggatacaaatgaacagccaggtggaggagatgcacagggcaagggatgtgaggaggggcccagagcttccatggcctccccggacccaccatcaacagagctttctgaaccctgaagtccagagacttttatggaggccttctcacacaggcatgactgatgattcactccatctccagaccctcaccccttcctggagactggggagcagtagagctaaaagtttcaagcttctagtcatggcttggtctttccagtgaccagcctgtatccaggaacccacccagagtcaccccatgataacaaaagacactcccatcacccaggaaattccaagggattagctctgtttcaggatgttggaaatgagtgcttgagtcgcaaaggaaataacactcgaacagaaaatatctcagcaaagcaaatttacttctgcagaagggtgcttcctgtttcagtcacgatcgcaagagcacaccgaacaagggaaggaaggggtttttaaccctaactcagttcctgtctctgtgtccttcccctattgattggggttggactgcacaacctaagatctaagctgacccgactggctactgtttgaaattgcggagggctagttgggtgggaaaggagagactgtccattacagtacaaggcatgtcagggtgcagcaagagcaggaagggtggtttaaatactagaaacgagagtacaaggaagttgggcttcagaacaaagaacaaggacattacaagttaaaccctttgaagaggaattttatcatccctgacaaggaactggggtcaaagaccaaatattagaacaaaaaagtctcctaacatccctgttgctcaggaattacaaagattttagaatctctgggccacgaactgggggaggagtccaagtgaatatttcttattatatcccagtattgctttatttttgttatagatttatcaagatacaattcatgtacccataagcttcacccatttaaagtgtatagctcagtgattttttgtgtatgcctagagttgtacaaatgctaccataatctaattttaggatatattcatcacccctaaaagaaactctatacttactagtagtcatctcccttttccccattatcccgacccttggcaaccactaatctactttttgtctctatggatttgtctattctggacacttcacataaatggaataatacagtaaatggccttttgtaactggcttcttgtattgtgttttcagggttcatccatgttgtagcatgtcatagtgcttcattgttttaatggcctaataatactccattgtatgggtgtaccacattttggttatccatcatcagttgatggacatttaggttgtctctacattttggctattgtgaataattctgccatgaacattacaggtttcatgtggacacatgttttttgttttcttgggtctgtacctaggggtagaattgcagggtcacatgtattaagcattttgaagaactggcagttttctgaagtggttacaccattttatggttcctctagcaatgagttgagggttctgatttctccacatcattgccaacattcatagttacagatcttcttgattctagccatcctcatggatgcaaagtggtacctcattgtggttttgatttgcgtttccctatggctaatgatgttgaacatgtttttatgtgtttattggtcattatatatcttctttggagagcatgtattcaaatccttggtgcatttttataatggatttatttatcttaccattgatgggaaaaacacttgttttattttacacatatctcactttgtgagtaaaaaaaaaaaaaaagattggaggccagattcagtggctcatgcctgtaatcccagcactttgagaggtcacagtaggcagatcacctgaggtcaagagtttgaaaccagcctggtcaacatggtaaaaccctgtctctactaaaaatacaaaaattagctgggcatggtggcaggcgcctgtaatcccagctatttgggaggctgaggcaggagaattgcttgaacccaggagatggaggttgcagtgagccaagaccacaccattgcgctccagcctgggcaacaagagcgaaaatctgtctcaaaaaaaaaaaaaaaaaaaagactggaaaaaataacaaatattttaaacacccaagagacattattaacagtttgattgacttatagttccatgtaacctaattttagggctcattctggtagtggaagaaacctgacattggtaatatataaatagagtgcacacacagaatcctgaatccttttaatgcctattaggatgggtgctaagcctgctgggagaatactgagttagtggagataactgatttacattgagaacgttctgatatttgtgattttctcatactatataaattagagattcatatgtgcaattgagaatatttcactgattctgttggaggtttttttttttttgtctttagctaagttgtatggaaactcaagagataagtacctcatttgtggtattgtgaatttttccaggggaagaaaaccttttttctcttacaaacagttgaagaaaattatcttttctgtttttaaattatcataattgggtttctccatcacagatttgtcaaactatagagtatgtataaagtcatgtttattcatttgatattctcaacataagtattctaaacttgattatgttaattcagaagaatagaacattaagcttagaattaggcaaatatatacaagttgcaattgtgtacagggattgcttatatttccaggataaaatcaaatcttatccccaaatctaattagcagctgttcattggtgtatttgacatacagcagccgacttttctcacctcaataaaccactacatcatcaacagatgcagcggagccttgaccgctaattagagttctctgccagaatcctagagcctgatgttggctctgtgaagagttgagtcaaggacatcccagcagtggtttttggaggaaggaaaattagaggttaaatgcatagccgtctacacaagagagatggttatttttttagatgcacagaagtggatctcagcattataaatacttttattaatcagtgctctttgctactttaaatctgtttccagactccactagtttcctaaagctgctgcagccaattaccaaactcgttttcttaaaacaacggaaatttattccctcacaattctgaggctagaagtccaaaagacacccatcaaggtgtctccaggccatgctttgtgcgaggctctagggaagaatccttccttgcctcttcctggcttctggggcctcccagcaacccctgtgttccccagcttgcagctacatcactccaatctctgcctccgattcacatggccatctcctctctgtgtatctttgtgtgtgtgtccttttccttcttgtaaggacaccagtcattggatttagggcccaccttaatccagtatgacttcatccttttttttttttttttttttttttttgagacagagtcttgctctgtcacccaagctgtagtggcacgatctctgctcactgtaaccttcacctcccagattgaagggattcttgtgcctcagcctccctagtagctaggactacaggtgtgcaccatcacacccagctaatttttgtatttttgtattttcagtagagatggggtttcaccaagatggccaggcttgtcttgaactcctggcttcaagtgatctgtgtgccttggcctccccgagtgctgggattacaggcatgagccaccatgcccagctgacctcatcttaacttaactaaattgcacctgcagagaccctatttccaaataatatcactctctccgattccagctggacgtgaagtggaggggcagggggttgggaggatgggacacagaaacctggccactccatttttgaggtacatttttaatgattgtagattttcatgtatgctacctatcaaacaagataacgacatctcacagatttgggggcgtatgtttgtatatttccggaaggactctaaaaatccagatggaaattgatatttttgaggcatctaccacacgtgaggcagttttgcatcaattatctcctttaattctgtgaagttactttctatttattctggttcctcatataattgcaatttgctgaatttgttggtgagttcttaaaaatgttaccgtttcctacctgttaccatatctgtgtttatctcatgccaaatatataaataactcttcctcagccacttaacagctaaatttgggagagattctgaaactacatgggcctcagtttcctcatctgtaaaagggggccagcaattcatcattaaccttgtgacattgtggtggctggcaaataccgtgtcaaacaggaagtgttccacaagtggcagttcctcgttatgcttttcttaaagctcttttggaggtgtgcacaaattcttattctttttgtgcttactgccaaaaagggtttagggatacatgtgtcgtaccatcccattttccagtagagacattgtaattcatgggcatatcagttaagaattggatgcagctgtatacagtacaaaaattccaaataacagcagactgaatgagaatgtttatttttccctcatgtgaaaggagtagggagggggtgggccagggcttcagagcagttccacagtcatcaggaaccaggcttctgtgtctctgttgtaccatacaagcccagggcttccatgcacagtcccctctgaccccaaatggctgtgtagctccagccctcgcgtttgtgatgcatgctaccaacatgtaaaaggacaaccaggatgcctctcccagctgagtggcctccctctaggcagcttttcaggaagtttccacataacacttccactaatatctcatttgttcagtgaccatgtttagctgcaaagaaggggaaaaatgttttcttctgtttcaggcctcggtgtgcccagctcaaatgagggttctcttatgaaggagggaggggagtggatgtcggggtgggtagccagcattctgtgctgtaatgggattgtattctgtagggctctgaagatagcacttggggattgaggagtctggtctgggaagtgaaccttgtatgtagctctggatctagggttctaaacatcctgctttagaactacagccttgtaagtgatttttgaaacaactcattcataggcagagaactgtctatccttcaagcctgagagaaaatgaataatttacctctccattttgatcacctgccactgtagcattggtccttccaggcctgcgtgtgccctgggagggtgaaacaaagctttgccagaggtgcctccactgtaaagcaaacccacagatagtaactgttgaaaccagcacatccctgtgcagtgaaaagggcattccgtcggcagtcaccaccttgggcctggtcagggtttcagtgaaatccctttccttatgttctgctggcattgaacataagggaagggatttcactgaaatgttgaatgttcaaatccaagcagcttcaaggaatccccccagctcccttgctgtcaggacaggaggtggatctctgggacctcttgaaactgcttggaattggaacattcattgcttttctctagacccagaactaaggcagctttgctcaatgccttgctcagccatttcgccaagtgaggttttatgcaatgttactcgtcactactctgaatcccagtttcagattgcaggacaaacagacgcctttttaatcattgatgccccttcctaagggcccaatcagaaagtctgactgggccctagcaaatcattccttgccaaatgtacatgaatgccagttctaggaagaatgaaatagtaaaaatttgtagaaatcaacatgtcatgtggaattagcttagcacattccagtggctctaggggtccttgtcccccactctcgccttataataaatatagaaagaacattgtccattcaaccctaagacttggattctggctgtgccatgacacctggtagctgaatgtctttgagctcatctttcctcacgtagatgatgagtgaggtgcaatggtgaaggccctctgtggctttgtgatttgtttacttgattatttattgattccattcatgttgcagatgtctgtcgagtatctgctgtgcccaggcaccgtgctaggcactgggggcacacagagtgagtaaggcacgagggcaagttccatccatctctaagagccatgcagactgaggttggagctgcgtgcacagggttatctgcccccagctaccagagcccatttccaagatggtggaaaccacttagtggagtctacactgcagtgagacagatttgctctcagccattgtcacactattaattagcttccactgtgttaagtgccataagcctttgttccagaggaatccaagtgggagaaaaagagcagagtggctggaaggttaggtggtaaggaggcacagaggagggagagggggctggggccagggagctgctgtcatgggcaatgggaagctagcaggggtggggccgtggtcagtttcttggtgggagcaggagctccagctttcctgtggctcagctgaaggttgggtacgaacgggacatagggctgaacagttcacattgttaaaaataaataagttcctcgtttataattctgattaacacagaacatttataaaatacagcctctggaaaagtgacacaaaatgcattacaatatgtcattctcaatcttttaataatgaaaaatgtgagacgcccaagatcaaaggaggcacatgttcagggaactgtttcatctcagagcttgatggggacaggatgatggactgggttttaaaaatggactacctggtcagtttcatgtcttttgacctacctcggtatgggctgttttcctcatgtttataatctagtttaggagctttttcccatcctggctcgttggctggtttgaagcctcactttattcttcagaagggccttggtctgtccaccaccagatgtctcatgtgttatctgacacataccagcttcgtggatatcaaagggggaggattacagggccattgagatcaaaacagagcaaatttgatgatgaaccaggggaaacaggccaagatgtgtccctaatgggcttgttccatccgtttgagtaaattatgcatgggctggcttggagctgccagcagaagcaggtagatctgcctccacctgccaaacccagatccaaatatggaagaaaccacaaggcagccactgactgtggccacaaatgggcacatagtttaccttcactttttgaaaaccatattaaaattgagtcagcactccatagaactgcttgatgaccaccaggccttcctttataaagttctcatgaagaacattaacttttgggaaatgaagcacttatatgactatctagtagagtaggaactacgaacttcttatgttacaatgagagagccattcttatttttttgaaccaagattgagagttttgtcaggccaagaggcagcaggctaatttctcaacctttcaggtgctagaaacacattgtgtcatgaaaatttagttgccccaacgtggtgccctgttgatttttaagtcaagggcaacttcattcttttagtacactgttggaagaatcttgtcctggaggtgttaagattgccttcattaaacatagtcattcaggccgaatgcagtggctcacacctgtaatcccaacactttcggaggccgaggtgggtggatcacctgaggtcaggagttcgagaccagcctgaccaacatggcaaaaccccgtctctactaaaaatacaaaaattagctgggtacggtggtgggcgcctgtaattccagctgctggggaggctgaggtgggagaattgcttgaacccaggaggcagaggttgcagtgagctgagatcgtgccattgcactccagcctggccaatgagtgaaaccctatcgcaaaaaaaaaaaaaaaagaacatagtcattcatttcttcgttcactctcatttttttctaagtgtatacatacagtctttactctgtctatagtctctacacaaagtataagtatttcatttattagaagaaaacattaactgttttggggcccattataatgaatttttaaaacatcacaattttagaattatgattttaaaaaactttactaccaggtacagttttgagaaagctctgggacattgaatagctctgtggctcccaaagataagtcgtagacatcacaataacaagggattatagtatttgagaccttactcatgaattttaataaaaggctgtgtgactcaagcgatttcgtattctgggaaatgttcaaattctgtactacatgcctacattctgcagggttaggctgggaacatagacctttgctgagaatctgaagagaattgctaaggcaactgtgtcccatatcctcaggtataaatcttccctccctccctcccttccttccttccatttgctcatttattcacctacccattgattatcataattctatcaacttttagaatcttgagactttccccaggaaatagatgaggagggggaacccatataagtaaagttgatctcattgggcataattagctcaaatattatatactcttccctcaagaactgagaatgtagggctttatagattttaaaaaatctcatagtcttggcatttttttttctggcaatccaagtcagctggagaagctagggtcgggaaactagttttgcaaactggcagaagtagtggttctttactaagatggctcaattgagtctctctcataaactgttagattatgggcgtcagagctgtttccaaaaggaaacaaattggagtccctctcctcactctctttcgtatcatctaggtaaattgtttaaaattggtctgtgactctggcaggtgtcaaccgctccaagtgactgtaggtttggggttgccctaaagccaaatgcgtagatgatgaaagcattaagaacttctaaacatgagagcaacagctgacgccatctacacggggctgttgggttttttcctctggaaggaagtgacagttggatgcctggcactttcacatggcctattttccccatgggaagttttataaaaatatccattaaggctggtttgtatatgcaacagaagggcataatatgcccctcaaatgaatatcattatctccatccatgaactaaaagcgtttgagggatggcaatgctgtgcaaattccacaaagccacagcttttggcagagctcaactatgtggaaaccgatctcttctctctccccgtctcagtgtctcaaggaaaaacctcattaagcagacaccttaagaagtgtattatcttccctttaaacctccaaaagggagggaagaaaaggagggatgtgagagtgaagctgcctgtgtcatgtccagaagactatctggaagtcttttttacctttctttgctttcttaatcacctcgttgaggttataaagtcacgaaggagactagatttggtagttgttactttaaaacagcccaaaacatttataaaaacaggtttttggggggtaatgaaaaaaaatttaagtcagccacaccgtcacatgttcccttaaatagccacagtggggtcattggtaacatagacccataagcacatgctccatacagaatgggtcatgcagctttcaaagagcagcccttcctcaaggagctgtgttacgtgaatactcatcaaagaaattatccatgccgcttctttctaactcagtgaaaacttgatgaaatagataaaatccacaaagctgtttagcccttcattgaacagcctattttagctggtgcctattttcctgagattatgaaaaatccagttccctctttacaatagtcaccaaaaacctccatttccacaaagggagtaggattgcctctggtcagtaaatggcgattccacctctgggtaggcagaagaaaaggggaagcaataagtgggagggaagcacctataacaggaaaatgcaacttttctagaagtgtctaggagacttgtgttgagatctgactggccagagctatggcctgtggctaccgatagctgcaggagaatcggggaaatgtattttgttagctaaacatgtcatttcaacaaagctcagaaatctattcataaggggaaaaaaaatgaatggcttttggtcagaggcctagcagtgtctgctactggaagggaattcaggcccaggaagtgaaaaccgagtgattctatctaagaagtcaaagtgaacacagtgaatagtttgcatcccatacagatagctcactatcggcagtccacagaaagtgtacattgactgtatctggagggccaaaatttcagccaaacatcttgcctaattattctgtgcatgttttttaaggggaaataaatctgtcttgcagctaacaaaatagccttgagtcttagagtacattttatcatggagcatctgaaaataactcagctctgaagttccatgatgaagttgtcccctggcaatggggtaaaaataagtctttatccattcatcagcacaagtttagctaggctctttcaatgacttagttctagcttatgcatctgctcctaaaacaatattaactcctaatagtctccctaaagaggaactcaaagttctgtagagaagactctggttgactttgatgttcatcaagatgagaggctcttttttgttctcaagattctggattaaatgagctgtcccagtcaatgaaaacttggggcttcaggaacctaacagagccaacccaacagaaaggctaggtgtttgattttcattaaatggcatttacttgtcaacactgtaattcttggaattcaagtgtgtctttaaatatttccactagaagctaatcaaaatcatgattttatccattgaagcatttaaaaatgtgattatttcttctccaaggatctagaaaccctatttcctcgtattctttgtgtttaaaaacatactttgctttaagtttactattgtgaaacctgttataatcaattcaatcataccacccgttttgaccacttagtgttcagaggattatttgctccatttaggaattagaaatcttcatatcttcattagaaccagatttctttgcgaagtctgtggttcttgtagtgggagttaagaggaagcattaaaaatatctgcttcgttcatggagtagatgcacttttcaggacagatccctgttactgatctggtgttttctttgaaaatgtcacagaaacctccaagaatggcaagcaaaagtaagaaatagtacctcctctaggtgcatacgtcccaggtgtgatcagaaagagctcatttgaagcaatgtatttgcatatgtcaaaataatctgatcctctaatgcatttcctctgttaagccatagcaggattttgcagctaaattcagagagtcagcaagaagaaaagggtctttaaaaataagttgaggctggttgcagtggctcctacctctaatcccagcaatttgggcgtccacggcgggaggattgcttgaggccaggagttcaggatcagcccgggcaacatagtgaaactccatccatttaaaaacaacaacaacaaacagctagccatggcagtagctcttcaggaagctgaggcaggaggattgcttgagcccaggagttcaaggttatagagagttgtaatcgtaccactgcacttcagcctgggtgccagagagagaccttgtctgtcaaagaaaaataaaataggttgactaacagtcataataaccagcagccttcctgcagactcttcataaatactgagttgtttataattaattgtttgcaagcaatgaccttctctttctgtaacctgagaaatgagattaacaataacagaggaaagccaattacaaacagatacgtttaccatcaaaattttagcccaacagggcagatcagaagccccagatggctcacttcttttcatctgtgcttaagaatgcagtgaccatataacaaagaatttaaaaattaattgtaatgagagaattgacccatggtggttaccttttcttaggaccatggttttcattttaatgtggaaaactgacatcccctggaaaagtagatattagagtaacacttgttgggtaattaactcaataaacaagggaactgacttgtattagtccattttcacgctgctgataaagacatacccaagactgggaagaaaagtaggtctaatggactcacagttccatgtggctggggaggcctcacaatcatggcggaaggtgaaaggcacttcttaacacggtggtggcacgagagatgagaaagaatcaaaagtggaaaccccttataaaaccatcagatcttgtgagacttactactacaagaacagtacgggggaaccgcccccatgattcaatcatctaccaccaggtccctcccacgacatgtgggaattatgggagtacaattcaagatgagatttgggtggggacacagagccaaaccatatcatgactcttcccaggaaaccgttgatttgtgagttgaatataggctctgctgcttatttagttttttctcccatttcctgtaggacagacattaggacagtttttcttctctatcttccactggtcatttctttggtaaaagaagttgaattgctccttctttgtaccagaatgcctgtgttatcacttgtagcaatagaaattcacaaatgtaatcagatgaaaggtctagaattttcctcagtggataacaatgtaagtatcacttgattattccatccttaattactgacctcagccagatttttttttgcctgaacttgatgtaggcttttaaagagacaggtacacatcagcgggcaatagatttgtttagagaccttggaagcctgatttgcaaagtaacttcatgtaatggtgtgtcacccacgaaggaatgggtggaaagctgcagcttgggttaaatgtcaccattgtcattatcttcagcaaacatgtattgagctcccaggagatatgcaacgtggtctctgatctccaagagtgtgccgtgccttgggagggaatgcaggattcattcgtttgacagatgttcacaaagaacctgcttgatgcagtggccctcttttgggtgctggaagctcaaccatgagcaaggcagatcaggtccctgctacgtgtagaatttacattttaaagaaaaagttgaatttaaacaaaaatggaataagaaagataaagctaaataagaaataagataacagaacaaaagctctggagggcccctttaaccgagagagtcaaggaaaacctggaggagtaggaggcaggcacagttgagttgagccctgaatgacaagtgaggcatcctcctgaagagctggggtgcctggctccaggctgatggacagcaagtgcaaaggccctgaggcaaggaaatgtttaaaacctatgctgagaagaggtgaagagaggggagagagggactttcctgaccagggcagggagtagggggctgtacccaaagacactgaggaaaacttgtagggtgtcatcaagttgacagagagtcctgtggtgggaaaagagactgaacaattacattgggtcaaatggtagccggactaagtaggcactggggagtgactagaggtttttgagcaaaggagtgatgcatgccagtcagtgaatcctgaagagttaatctgactggggtagagtgtggcatggggaaggaagccaccgagaggctagatatggggctgtaaggcctggcttagtctggtaaagtggggttagcatgaaagggccagttcaagagacattgccagccacatggacagtttcatcttggccagttatctccagactctgaaactctctctcagtctgtttctactattgtagtactttggggaaggagtagggagaaaaagatcatagacttgaacaaatcaggtgccactgggcagagggttctaaatttgcactctccaacacagtagccactagtcacctgtggtgatttaaatttaaatgaattatttggccaggcgtggtggctcacacttgtaatcccagcactttgggaggccaaggtgggtggatcacttgaggtcaagagtttgagaccagcgtggccaacgtggtgaaaccccctctctactaaaaatacaaaaaattagccaggtgtggtggcaggtgcctgtaatcccagctactctggagactgagggaggagaatctcttgaacccaggaggcggaggttgcagtgagccaagattgtgcctaggtgacagagtgagactccatctcaaataaataaataaataaataaataaataaataaataaaaagaattatttgcaaataattgcatcattagaaaaaaattataaatgaattaaaagaaatttaaagaattcattaggagtcaccacatttcaaaggctcagtagtcatagaaagctaatggttactatattgaagagtgtggataaaatacttccctcattgcagaagattctgttggacagcattgggctggatcacgaattttctgatgaacaaacccttcatctttctatagatcacaagaaagtctcccatggtgttttatatcacgaactactttgctgtggaaacttctgtttgtacagaacgtttcctcttacggataccaattaagttctttatgatattacattggtttggctgtcaaatgttgtgtgcttaacaaagaatgatagaaaaatcactttccagaacagaatgtttgaattgcatgtagcatagaaactgagtaaaaatttcagcctgatttaacatctttggagtagacttcttaaaggagagggatatgaacactgtaaaacacaaattcatcagaagtgcaatgacaacagggttcctctctactctgctggtgacaaactttaaaactctattgacttgtatctcttgatgtcattctattcccctctagtggaattaaaaggtatctgtctttctactccagcttggacacattcgcagtagtaggaatagaaatctagagataatgaagatagaagatagcattatcacttattttcatatcatgataggctgctgctttacattttaccctttttcctgtcctcaggggaaaatagccttctgttctctgtctatttgagctacttggagaaaaaaagtttaggtatctatcctatgtatcactatttatcctcataccagaagaagccttattgcccaatatgttactaggatgtgccattggttcagcgtctagcacagggtcaggcccgttaattgagttagaggcatgggttgaggtcccgattttaccacttaactatccatggcttcaaattcaatcatttactttcctgaacctccgtctcttcatctttaaactggagactctcctttgactctccatggtcgtatcacaagataaaaggaaataatgaaacctcattgaaagttaaggtggactctgcacatttatgtggcctcattccccaccaccaccactctgcccccagcagcatccttttaggaaagatggataaacaggtaaactagaaatatgtttccgaactctctgcgtacaggtgaagcatggtggggctggggctacctttaagttggttgcaagagcccaaaggctaccatttggtttggttatatttccttttttcttttgtcttcctctttttcttttcttttttttttttgagacagagtctcactctgtcatccagcagtggcatgatcttggctaactggaacctctgcctcccaggctcaagcaatcttcccacctcagcctcccaagtagctgggaccataggtgcacaccaccatgcccagctagtttttgtatttttttttttttttttgagacagagtctcactctgccacccaggctggagtgtagtggcgcagtcttgactcactgcaacctccgcctcctgggttcatgccattctcctgcctcagcctcccgagtagctgggactacaggcacccaccaccaagcccggctaatttttttttttttttgtatttttagtggagacggggtttcaccatgttagccaggctggtctcgatctgctgacctcgtgatccgcctgccttggcctcccaaagtgctgggattacaggcgtgagccatcacgcccagcctagtttttgtatttttggtagagacagggtttttgccatgttggccaggctggtctcaaactcctggattcaagtaatccacctgtctgggcctcccaaaattctgggattacaggcatgagccatcgcgccctgccattttttcttttaaatgttgagttattctaagtttaaagtggctaataggagaaacaataatttggaacattagcagttacagtatttctctagtctcaaaaagagcattctcactagaagtatccacagaaatgcacttaaatgccacatccctccctctcccctttattccagccaccatgtcataacctccctctgcagagcagagaattaagctctaaagactagacatttgttgtggcaaacagtgctgaatttctgcctttattttaacacaactgtctgctacatgtagaaatattagcatatttgcagagatattttcattaggtatttgttttgctttaaaaaacaacccagaaaggtgaatttcaaatgtgcacagtaggtttctgccatcctaaaggcaaacttcaaaattttttaacagctaagcaaaccatgccagtgggttaagatgtaggattggaagtctctgatgctgtcctggggcgtgggggttggggggaatgtatcaatgagtactattttggtcattattcttcaggttgagttctgggaggcattgcttaggacacatttaacgccacaagggaaagtgcattagtgttgccttctgttgtttaaagaaaaggagggagagagggaggaaggaatacatgcatatgatacttttgcatgctctgtgaccaccagcacacaaacaaatgcagagatgctgagaagtgcaaagtgagacgtggaagggcaggtgctaacagacaatgcagctatacttgtgatggtgcttttcacgagtgaagaccaaggtgtaagtgtcttttacccagtcacagctataaaaccgaatccagtggatcaactaaaactaagtgccaaagaggccaatagcagtctagaactacgtgtgagtgtgtgagtgtttcttctggcaggttctcctgttttacggcttcctaccagccatccttaactaacgcatggttggaaattcagtatccccccccaaaaaattgaaccttcatagtttcccaattcctggttttagaaaaggaatgaaggggtatcaattagagatcaagtgcatctttgaggagagaatggcttgctacaatcgaagagaagaaaacctcagctatcaatttgtggaggctttgagcagtcactgagcagatggggttgatgggggtacctaactcatgcacggccaaatgcccaagcctaacaaaaacggagaaaaaccaaggattaacatatcactttttagctaagatgtaaaactggttactggcaagcttattccagcaggctcagcaagcgtccagcacaaccacaagcagcttgatcaaaaacagacctctgcctctcggtggatagcttttgcttttaatattttatgttcacctctttggctcaagatttccacttctggcttttatccttgggaactgataagacacttgcacagtgtgtgcttatagatgctcatggtagtgttattcataacagtgaaaaacaaaatcacctgaatgtttaggaattgggggttgattaaatccatcatagtgtgaatgtatgatgaaatatcatacagtaagatgtgacactgatttatatttaatgacatggaaaaatgtttaacataaactgttagattttttaaaaagctacctatcagcctctctctctttttttctctctcatctttcttgaatgaaatccaccaaaatgttaatgtgtatatacttctttctacttaactaccttttctaattttttacagcaagtatggttttacctacttaaaagaacacgtgacctaaacaatagaaaattagtaacaaattactagaatactattttaccataaactgcacatttcgatttttaaagtgaggttataaccaaaaagatcactgaacatcaataaataaaattggctgggcgctgtggctcacacctctaatcccagcacttggggaggccgacgtgggcggatcaccttaggtcaggagttcgagaccagcctgaccacatggagaaaccccgtctctactaaaaatacaaaaaaattagccaggcatgttggcgcatgcctgtaatcccagctactcgggaggctgaggcaggagaatcacttaaacctgggaggcagaggttgcagtgagccaagattgtgccattgcactccagcctgggcaacaagagtgaaactccgtctcaaaaacaaaaaaagaaaataaaatttatcttaacgtgggtaagaggggttgctgcttgggaaatatctactggaagtaatgaggagtcagggtgaagttcggaggtacctaaagagacagtcctgccgatttggacttggcagtcgagaaaaagacatggttacaccttctgcctcctctgtgtgtttaatagatgaacaaataccagctgctggggaatcttatgacattatagtgaggcataaaaatcagccctcttgcaaataatgttatactatttgaacttcatgacaaaaatgagtgcagaatcccagtcatgttagctccctactaccaaagagtggacttcaaaatttgacccacatcatcacagaatagcagacagggtacctcacacaatgacctgatcctgtttttactaaattaaaatgatgggatcttgcagactctgaataaatgtgtttttgtttatctctgatttgttctcagtcgtacagacttggccatgaattcttataggagacttaccactttgtacagggctggcagaggtttgcataatttagatgcttcttgtattcctattttacgttcctttccaactatggtattggaactaaccaagtctgtaattagcataaacattatttggtgctaaaaaaatggtatcacattttaatagaggatagatcagtggttgtcaggagttaggggaggggagggcatgactataaagagggtggcatgggggagcttctttgtggagattgggaagttccgtatcatgaatatgaatgtgataaaatttcacggaactacacacacataccctcctatacaataagcacatgtgaaatccttatacagtctgttcatagcattgggccagtgtccatttctgggttttgatcatgtgctatggttatgtataatgctgttatttgagtaagctggtgaaaggtccatgggaactctctgtgctatttttacagcttgtgagtctaaaattatttcaaaataaatgttttaaataacatttttttaaaacgtgagctattcctcaaaagattactattctcagagttaccataaagctagttaaagtagtcagtacccccaattgaatgggcaaagaaatacaatatttgaatgactttttccttagaggaatcagtatgacaataggaaaaagaaaaataatgatttatccttgaaacaaaaactggaacaaaaacatgatttaagtatatgtgtaagtatgtacttaaatactaagtagataggctagagaaagacatacaggaatatctgtggaatattgtattattgccccccactaattgttcccttacctctctgatgatcataggtcctacccattgctatgtgacttgtagcccctccctggatgcagagcatccccaacctagggtcagtcttggccaaagggagtgaagtttagctgcttcaagaagcattgacagactgtcgttcagtttcacctcttgcttttcctttcctctgccatgagaatggcatgtcccaaatagcagctgttccttcatctctaggtcctggaataagtagacaggtgctccttctctgaagctcctgatatataacatgagtgagaaataaacctaggccaatgagattttgaggttgtttggtactgctttgttgctgagctaaaattacatctacaaggtggacggtttcattgggcatcaccaacttgaaactactttcagttgaactcaaacctacaagctttcaaagtttgaagtcctaacccatcctgtggctctttaccaaataatataaaatggcagtagatactaagctttctgagggccattgtagattgtgttattatttaaaatatttgctgtccccttctggggaggttattacacccggccctgttgacttccagattggccatgtgccttgctttggccagtgacatgcaaacagaaatgatgacaccatttccaagcaggagatatatgagccgttgagtactctgccatttctttttttcctctgctgtgagattgcatatgtcctagatagtgactgctaaagtccctaagtgaaaagtgagataaatttttgttgtggaaagccactgaaagttagaagtgatttgttagcagtataatctagtctcttcattccaagttagataggacctgagcctcacctggagtcttcacatggtgggcacaccacctggcacatagtaggtgtacggtaaataattttttttaggcaaaatgaagaaattgataggtacctaggaaataaccttatttataaatgagttatgtttagggtttgtgatttgaatacttacacattttaaacatcttatttttattactgttactttagagacagggtctcactatgttgcccaggctgaagtgcagtggctattcacaggcatgatcatggcgcattacagcctcgaacacctgggcttaagcaatcctcctgcctcagcctcccaaatagctgggaccacaagcatgcgccactgcacctagcttatctttttttaatatcagaattccatattaaaccatcagaggtttttgaaatttaaaagttgtgcagggtgactataatcaataataactacacattttaaaataacttaaggagcataattggattgtaactcaatggataaatgtctgaggggatggatactccattctccatgatgtgcttatttcacattgcatgcctgtatcaaaacatgacatgtaccccgtaaatatatacacctatgtactcacaaaagttaaaaataaatttgtttaaagttgattgatgatggagcaaaaactggacataaaacaatgtcttgagatgttaatgaataagatatattatgaaataggaagatggtcttaataatagcttttcattaagagttgtattggtggcttgtggtgttaaatatcttcatagtgccttcatatagacaccttcttctgcagattggtagagaaactgccaacaaagcccctgtgtagtgagatgaggtggttgcgccccagttcctccagcatgctaggcttttcccccaatggtgtctcatgaagcagccggaatatagccagtgtattcagctggacttcgtggtaatttgggttacatagataatgtatggatttattttttaacttaaatcttttcagataatgttaaaagtctcattttactttcatgtctgaacctaatctgtccccacactttcccagagtcatttacttatttatcaatctagaaaaaaactgtcttactgttcagaggagggggctttttgttttttgtttgtttgttttttgttttttgagacggggtcttgctctgttacccaggctggagtgcagtggcatggtcagggcttactgcaaacttgacctcctgggctcaagcagtcctcccacctcagcctcctgagtagctgggactaaaggcataggccaccacccccagctaattttttttttttaagtagagatgaggtctcgttatgttgccccagctagtcttgaactcctgagctcaaacgatcctcccaaagtgcttgtttctgttttttacataaaagtcattatattttatgtcttgtgttgtggcttgctgttttcattagacaatatatcttagagatctgtccatgattttacagaaagatctagctcatttgatttaactgccatggagtattccatagtataaatatattacagtttatttagccattgccttgctgatacagatctatctagaatttttaaaataatttattgcttcccattgaatgattacagcatcttgcatagctgggcaaaggactcataagaaacctactagcaaaacctggtttgacaggttcatccaactgtatagatgagtgttattcaccagaataaactgaagtgttacattgcagatcagaaattaatgagcatcaccaaaaacggaatttctttcgttctttcttagaaaaggaaacatccaacaagatcagtatggtcagaggccaagtgcgatcctaagcccaaatggagagtgggccaggcagacccagccgcctgagaaggggcatggcagctttactgagtacatgatacacaatgtaataattacagtggtccccaagttacatgcaaccaccctgatcatatgacttggttttggtaatcctctcatgttaaccaaaaaaattttaaataggtctttttttatatcatagggttaaaaaaaaaactgcttcctacttccctaaatttcttaagaaatttaagatcgcagtaatgttgctagatttgcccttgaagcagtgttttgggtgtttctcatatagtcagcatgtgggtgacatttagacccaagcttggcttacaagcatgattcatgagaacacatcagatggtgacagcagagaatttcccttggtacttagaggggagcagcttcaaggaggcatactgctctgactgctggaggaagttgcaccgcagagcttctgttggttaaaaacagtcttttccagaaaccctgaacccccagccctcaatgacagatagtttggtccttcaagagaaacctatggggcattttggaggcattcaaatatgggtggaaaattcaagccaggatgacctctaaccaaaaccctgccattattttactcattgcattaaaagcacatgtgcagtgatgtcagttcaaatatgaacatccccatcaaaaaacatcattggttgcctgcctcctggtgtgaagggagcgttaactcctctagagatttcacactgcacatagctagattagtctccagcctcaactactgcctttgcagacttacctagaatatgacttccaggtggctgtagacacaagaatgcatctaggaaatgtgatgcccggtcagcatccgaattctgcacagtgtagatccatgtgtttattttaacatattgcaaatgatagcggtaatgatgatggtgataaagagaaactttggaaaatcttggtagaaatgttgagaaatgtttccaaggaagactaattaagttgctacattataaaactaagaaatgagaaacaggccagcggatgctttcaatagaatttgaatttttcacttgtcatttttttcctaagaggtttagatttagatttgtaggttagactttattcatgcctatgaaaagtgattagctcaaagccttcatttttttctcccaaccacatatatgacagaagtgtctgagctgtatttttccctctttcgttataatataatgtcaggcttgtgacatatgacagcaggtttcacactccacttaatgacaggctgccagttcctggagaactaaaaaggaagactaatatgtatttgactaaaaaggaaaatgttattaacttggtaatagtgaagacttggtgtgcaccagatatttctttgtggccctaagtctagccagacttgctgtaacttatctgtgggatgactttatctacagccctttggtgcacagtgataaaagtgtgctttgttaaggatttagtagttgctttcatacacatttaatgaaggtctaccatgtaggagataaaatgatttcagaggatacaaagacagacttctgcattcaggtagttttgcagttcaagaggaacctattaatgtcactttcctctttttaccttggtttccaggaagctcagagataaagttaatacttaatcctcagttcggcagcatcctttaggacctctctttcctccctgttagactgtcatgtcagtcctctgtgtgtgggaggtgagagataaatgatgaaaaattaaaggggaggtagacagaatcataattatcataagtggcagaatatgttaagtggcatgcaaaagacagaaataaaatgctctggaaggtcagatgaaggagagaaattgtaactggtattgacatctggagagacttcctggaggaggaaggagactttgataatgacttttcaggtgtttcagcaggtggagtcctggcaggtggaggcagcagccgaaatgaagacacagatgagagacaccaaggtgcctgccatctgggactcaccgaagagaaagatcagatgtccaggtttatagatgtaggaaaggatcctgaggctgctctgatcatttccatgatgaatttgatgaatttgatgaatttggtagctatcaggagacctactcttgggccagtgggggcagcttgtgccctggtattgtggtgttcaccttatctgtccatccaggtcacaggcatcacctggaagccgcaagccttacccacctttcaatccctcatggcccaggctggcgccacattttgcctgagctctcattctgcctgtgccttgagatgattttgttttgaaaaacgggtcagaaaggtttggaaacagcagtgtgtttcctttacttagagaaaagcgtcctaattctgcttttcagataaatctttagactcatcctcccacgactccttaacatgagatcagcgggttatatatttaatgaagaagtaaaagatgttcctttggtgctgttctacttgagttaatgtatttcaccagccaatactactgtattccctattcagtaaacagtatatttaatacatatgtagtacagtaaatgctcttgcattggaattatgcatgtaaaatctgatgaaaccctaaactctgtagtttagttaatggtattgtagcattgtcctgggtctgcaaatgtgccgtggttatgtaagatgttatcactggggaagctggatgaagggtatgaaggaacagtctgtactatttttgcaaattcttgtgagtcttaaattatttcaaattaaatagctttaaaaaaaaaagaattaaagagatgatctagtccggttgttttcaactttaattttagcagtggtctccctcttctgccttctcctgcctccatcctcagcatccttaggcaccacctgacgttttaaaaatgctgatcccacccaatacatttaggctccagatgaggaaatcagggcccacagaagtaaaatgcatcactatttagaggctattgatagaaacacagtgagcctggggagtttttaggacgagttgctctctgcagatcttcatgactcacagctctgtcgctaacactgtggtttcttttgtcagactaggtgagattaattagactggaaaagagtttccatgctcctgcatcccattgctgcagtgcaagaaatggcatcatccatataattgagacagtgcaagaggtggtttgggttagcagacagtttaacaaaacaccactcagggcatttgccaagaggactggcttgaaagtccaggcatggggtgcagaagtcgggaatgcgggacctaggaggaagtcccttgacttctgccagcttggccttcactctgaccacctatgaagcctgagggtgattagcccagaggatagggagtcctgtttcctccccatccaggcccaagtcactaaagtattttggggaaaccctgggcaccttgaagtttgctcctaaggataatgtaataataattgcttatatttgtctaaggattttcaggttgcaaagtctttctcttatattccctaagctgggtgtcaccccttgcccatgacacgggcagattggttttatttctgctttataaataaatgacgtgacttttccaaggtaagagcttgtgccgggactggggtcagaacacaggtctccacagtcctgctaagtgctcttctcataggagactctcttgttctaaacaaagatcctggttattgtgaagcacctgtgcacaattgctgatcaacaaacagctggtgctattattattactgtcgttgtaattcataggcaggatctttggccacatgtaattttggggtgtgacaactccaagacttgctggttctccagacttaggcaggaggtggaagcgatggtttcctctcttcctacacctccaaacggtgagaacctgaaggtgccatatggctgttgcgtgagtaagccttaggttttcctgaaaagtgagttgcctgtgtgccacatcaatggagatctatgtgacaaccaactggtatgacaaccaccctggggctgcctggcatgcacatactcctgagggctccgtgcgagctgccattctttattaatttagtgccatttgttgatgcctcgtttctgcagggaaaactggttccttcatttcccctggcatattctgcgccctccgcactgtaggacgcaacctttcctgtcaacacaggtatttttaattggtgctggcaccaacctactccctgaacattcttcctgatgtcctgggatcctggcaaaagtggtgggcttccctaatggtggaagtctaaggccatacttcagaccgtggacccaactactgctttctagaagaaataacctgtcaaggaagatgttgatgtctcacaccctgagagaaacatttaggaggtaaaccactgacctgcctcgaggatatcattaatcatctacacatagaggtgctaggtactcacctcgcaccagtgacacacttactaaatatttgttgaatgacctcctagagcagtggttttccagtctttagtgtgtccgccaacacaaggatcactggcaggatctgctcaaacacagactgtgaggccccacccccagagtttctgactcggttggtctgggaaaggactaagtactatgcctttctaacaagttccaagtgatgtgatgctgtgcgggaaccatgctctgaaaacccttgtcctaaagcagggcttggcaaacttttcctaaaaggacccaaatagtaaatattttagattttgtggcccacacagtctctgtcataattactcaactctgccattatagccaaagaaaatatgtaaataaaggagcatgtctgttttccaataaaattttatttacaaaaataggtggtggacttgtttctaaaatatatatatatatatgtgtgtgtgtgtgtgtgtatatatatatatatatgttgcaaatataaaaatgcgttgtaaatatattgagagccagatcctcattctgggtagatctccaaaagctcttgtgatgggaatccaacgttggtcacatcgtaggtctgtgctctctgaagcagcacaaatacaaaacttggagtgaaacagagatgagcgttgttcctgtgcaaggatcacgtgcaaatatgtgaactgtttcatataaaaaaaaatctgaggtctgatgttcatcaaccatgtgatttggggaaggtcattaacatctctgtaaaacgaggataattaggcagtaaaaactaggggaaaatgctcatttttataagttctgggtggtgcagacacgaggggtttactattctttatacttctctgtatgattgaactatttcagaattctcaaatctgtgtctttaaaaagtagtcataggccaaatgctttgggaggccaaggcaggtggatcacgaggtcaggagatcaagaccatcctggctaacaaagtgaaaccccgtctccactaaaaataccaaaaattagccaggcgtggtagtgggtgcctgtagtcccagctactcggggggctgaggcaggagaatggcatgaacctgggaggcagagcttgcagtgagcagagatcgtgccactgcactctagcctgggcaacagagcaagactgtctaaaaaaaaaaaagtcataacaagcctttggcatatatgtggcttagggtttaggttccatagtcaaccaaaagatgaattatcttacagtcagaatcacctttggaattccccgaaatcaccagcaccaaggccctcagaaagtcagcagccaagaatattctgctttatgtcactttgcattggagaaaccctgagagaaaggttaattcaagcttattatgtctacagtagatctctggatctcctgcccttccccaaaccctgatcttctaaagtcttgcttaattcagtggatggccactctgcctttgcagctgctcaggccacaaggagtgattcaagaggaagaacttaataggaatgagtcctgataggtacatgttgaatatgaaattgttttatagttccaatagaacagtagagtctatggccataccaccctgaacatgcctgatggaaagctaagcagggtcgggtccggttagtacttggatgggagacaaatagatcatctaagtagaagctcagagctctactattatttatttatttattttttgagatggaggctcgctctgtcgcccaggctggcgtgcagtggcataatctcagctcactgcaacctccacctcctggactcaagcgattctcctgcctcagcctctcaagtagctgggattacaggcacacgccaccatgcctgggtaatttttgtatttttaatagagacagggtatcaccatgttggccaggctggtctcaaactcctgatctcaggtgatctgactgcctcagcctcccaaagtgctgagattacaggtgtgtgccactgtgcctggcctacctttatatattaataaacagaggaggctgggcgcggtggcgcatgcctgtaatcccagcactttgggaggccgaagcaagtagatcacctgatgtcaggagtttgagaccagcctgaataacatggtgaaaccccatctctactaaaaattaaaaaaaattaggtgtggtggcaggcacttgtaatcccagctacttgggaggctgagacaggagaatcgcttgaacctgggaggcagaggttgcagtgagccgagctcgtgccactgcactccagcttgggtgacagagtgagactctgtctcaaaaaataataataataaaattgaataaataaataagcagaggccccagaagcagaggcgcttatctgcactacctgcgtggtacctacctaccctgtgatacggcactcttctaagcattttacaaagactgactcgttttgtccttatttatagtaaccacagaagacagatgctgttaatttcccagcttatagatgaggcagaaaggataagtaattcgtccaaggccatgcctctgggtagtagcagagctggaacctgaacccaggcagtgactccagaatctacgctctttaaccacgatggtcttctgtatatcatttttcttccctatccataatctgtgagttgagggacaaaagcttaaaaatctaaagaaaaaagatgtctggttgcacctttggtgctctatgtggtatgctagagaaggtaatgaaattgcagtgggctatggggaggcgtaatttcagtgcctttacgattttcatctgaccatgctgagtttccctataaaaagcataaaatactttggagatggtgcagaagcaggaaaatgtacctgtcagtttggatgtagatctggtttcgcagtgtattgtatttctggatactctgtccaagaggagatctcctgaatgatccatttagggttgttccgttcacttcacaaacacaccgattttgtgtctactcgtgccccagcctgcgctaggcagtggggagacagagaagccaagttgtttaaaacactgtgcttgtccccaagggctttggtgaccatagctccagaagtaatagctttggtggaaaccgtggtatgtgcaaatttcaccccataaatagaggaaacataggtattcattatattaaaacatgatgcgggccaggtgtggtggttcacgcctgtaatcccagcactttgggaggccaaggctggtgcatcacctgaggtcaggagttcgagaccagcctggccaacatggtgaaaccccatctctactaaaaatacaaaaatacccacatcgtggtggatgcctgtaatcccagttactcaggaggctgaggcaggacaatcgtttgaacccaggaggcggaggttgcagtgagctgagatcgcgccactgcactccagcctgggcgacgagcaagactctgtctcaaaaaacaacagtaaatatctaaaatatttagtggcgaagtcaccaccacccattgtgtgactccagagaatgatgcacagtctggtgttatcgaaccttgacttggggctggggagtggtggggcctgagcttggcttaatctaaaaacgtggtcctttcatgactaaaatgagcattgtgcttcttctcctcccaggaccccaggagcaagcacaagttcaaaatccacacttacggaagccccaccttctgcgatcactgtgggtcactgctctatggacttatccatcaagggatgaaatgtgacagtaagtaagttttcttttccagttcatagcgaggctctgtagctcatgctcagggtttgctgagcaaggaaggctcagtaacttttcaacaccaactcttcagtagagggaattagttcagatatctaccagactgacaaagtgtagattcttccactgtcaaagttccaggttattgaactacttgattgcctcattatgaacccccaaaaagcactcgatttataaatgaggttggtgggtgctgtcactttttttttttttttagtggcagaagtcttcaatcactgtaaaatatagcctagtcaaaccccaaagaagacttccaccgccaggtccacatttggttatagcttcaaaataagccaagaaaccctactcattatcttcctgtgtctctaattagtgggtggactgtggaaaaatccagtaggctcttcttaaaactgaaaccaaaatgaacataaaaaccagaatagcatcttattgaagttcactgacccagcatgtttatggacggatcaaatgtgtattagcctggctcaaaacgctgaggaccactgacaagcaagacaccagcccttttctgttattttttgttacgtgtgtatctccatcaactaccaggaggaaagaaaagcaactatgaagactctttgctttgatcattttttttttttggagacggagtctcactctgtcacccaggctagagtgcagtggcgcgatgtcggctcactgcaagctccacctcccgagttcacaccattctcttgcctcagcctcccgagtagctgggactacaggcccccaccaccacacccagctaattttttgtatttttagtagagatggggtttcactgtgttagccaggatagtctcgatctcctgacctcgtgatccgcccgcctcggcctcccaaaatgctgggattataggggtgagtcaccgcgcccaacctgctttgatcgttcttaaagtatgagattcctcaggctatgtttgtttaaatacaagctgatacctttaggacatgaaaagttaattgccgagcctgtttttctaatagatcgggaaccactgtggaaatatcagcctattgccatttgctaatgactattttcatttgctatgatggccagaagctgatatttgtatcttacatggagcaaactgtagaaaaagaaacataaacgagcatcatagagtagatggagtttctcaggacacagggattcttcaccttacagagttgtacggcatcacaaccaaatgcaatgtttgtttacttcaagaaacgctgggatttccaccatttaatcccagcactttgggaggccgaggcgggaggatcacctgaggttaggagttcaagaccagcctgaccaacatagcgaaaccccgtctctactaaaaatgcaaaattagtctggtggtggtggtctcctgtaatcccagctactcaggaggctgaggcaggagaattgcttgaacccaggaggcggcggttgctgtgagccaagattgtgccattgcactccagcctgggcaaacaagagtgaaactcggtctcaaaaaactagaaaaataaaaaaaagaaaccctaggattccaaagacatggttttcaggggttctgcaagggcttacaacttaagtgcatatgtaaatatattttaactactttaaaactgggaacaaaataaatatttgaatgtgttacatactcaaccttcactccttgggcagaacttgcaatcaggtttctcctacagcatcctcttcactgaagagtcagctgggatggggaagcatgccgttagacacggttcctgtttgtactcagttttctgcatgaatgaggatttttggatgctgtactactttaacataatgcaaaaataaatgagatgtggaggctggtctgagacatcaactggtttcaaagttgtgtttgtatcagagggctttattggtgatccttgaatgtctttataataaataagtggtataaatttgtgtttgttagctgagtttatgctaataaaataacactcatatggtttacatcattagattctgctttagactttgtttgcaaaatggtttccttactaaaaatttttgaaaaccgctgacctggaccaatgcttttttgtttggttttgttttaaactctttttcttgggaatcataaggcttctgtggctgccgcctgtgctcctttctggagacaggaggagagcaagccgatgagcaccaggactgcaacccctactgaccttaacttctgcagagaagaagcctcttcctgtgcccttccacctggtgcaattgcaatcctagatagagttccacttgggatggggcaggacgtcagggggcagttagcaacaacaacttgagtgggccaacctctcactttgtagagttggaaatgaaattagagcaaatcagcttcccaagatatacagcagagactgcaacacggcccagtgcactttcacctcccgtcccctccccgttgcctctgtgctttccagaggctctggcatttactgccttcacattgcaaattttgcccggacacttaaagacatgatgtggttaacacaagcaatatacataacacagcttttcaagagcctttatattggctaaattcgaggtgtagaattttgaacagttagccttggaaatagaagcctaatagcatccacatttgtgaattagctaattgttctttcctcagtatgtccatcattctgctgtcagtgtttaatcggagcagtatacattattcatgatgctttttccaatttactttgtcatgttaaaattaaacactcaaaatgaaacggaaaggaagactccaccttgatgattacagaataaccttattagcatcctggcaaggatttgcaaggattccagtggccttccctccttctggaagcctaaaggtacaagggtgatcgagctggaacacccacacacagtcttctgtttgtttccggcacacaggattcttttcagggtttctttggttcattgcaataatactgatctttttttatcctccccctgtctcacccacataatgtcagctgtaaggaatggctgatcatgctaggcgggtatttgttttacttggaatggtatttaaatatttgaagataggtttaaaatatcaaatacaggttctttggggagaaaaacacaggcaatgtacttaaaccttgttgaaaatacaaggttagctgaggaaaggaaaatttaatgaattttctatactcaatccacagattttcactctttctcagtggtaagcccagaatgacataaagaattcattagcaaaaagtcttatgttcaagctgggtgcagtggttcacatccatagtcccagtactttaggaggcctaggtgggaggaccacttgagcccaggagttcaaggctgcagtgagctaggattatgccactgcactctagcctgagagacaaaaggagaccctgtctgaagaaaaaaaaaaaaatcctctgtttaacattttcatattattttgcctctgtgtacataaaatatgaattaggctgagctttgtacatatttacctgtgtgaattttgtatactgttaaatacttgaaacaatcacagaagcccaagctgggatattttgcttcagtgaagactgagcaaatatggtatgagtattttaaggatattgtcactcacatgaagcctgtgctgtacaggacatctgctaacagttctttatgtcaccaaaaacattatagcaaagtatcgagttgggggtaactcattttcacttgtgctcatgcaccaaaacactgaggagcggtggttggagtccatatgcccagctcaccctctcctttcttgattcacagcctgcgatatgaacgttcacaagcaatgcgtcatcaatgtccccagcctctgcggaatggatcacactgagaagagggggcggatttacctaaaggctgaggttgctgatgaaaagctccatgtcacaggtaaggcttgctcatcccggagcagcatcgtgggcaggcatttggatgaaggttacactgatattaaggcagggtgggggctgggctggatgccctgaggcctctggagaggcagtcgccctggtggagccatcactgtctcagagccctccagccctctgagccctcgggttaatacacctcccaggagatgggtctgtacacccaaattcccaaatactcaatgtcacacaaagtcacaagcactgtgtggattgggctattctgacagcatggcccgtgtactctcctcccggtgacagggggtcaggggagccaattaatcaaaatgctgttggagggaatggaactagaacaaggggaggcgaatggatggatgacccaggtgttttgtggcattggcctgtgatggcccaataaatccacctcagcgatagcaacagccgttgagtgcttttgcttcctctgtgttaggtatggtgctaggaacttcacatagattagttatttagacctgacacctagctggttattagcctcgttttccagaaaaggaaactgaggcacagagagatcaataacttgcagtgttacagttagtgaggagctgggataggaatggaggcatttgactccagatactgtgcttataattaccacacctcctacaaacagcctggctatgggaccggaattccctatccaggggcctggttactccctcctcggggctgtttctgggtgggctctgccacaacatggctttttcctgtggttttcccaccaaatccactttcggttcatcggcacactcagtcaagttatcctggagtcttattggcctaggacccatcccgtgtcctcaagatggcttgagttctcggtaccatgacccactccatgttggtgtatggttcagctctcaggcatcagcctatttccttgcacttggggtccctgagggaccaactgtatacattacccttgttgacaagggcattcattttcatttgatcagcaaaggtatcttccttctgtatctaggaatttgaagctatcataaacatggaaagactgatgctaatctattaggtttagataacagaaaacatcatagaagaagggtttaggaggatctgttttaagaaaaaaaggggaaggtggggacttccaaagaaaagcttacctttggaaacatcctcaggtttttcctttgaaagataagcaaatgttctaaccagggctgtcccctcaggtaagaactcagagaagaacaaaggattccaaggtatcactgggagagggtaacagtttgcctctggataaccttgaaaccagctatagctgatggtcaaaatggaactgggaatgaaatccctatcatagatacagaatcccttctgactttttgtagtttttagagaaattcttttattttctcaagaccatccctattgtgccattgcctttggggctgtgattgtcacctgcatttctttttaatgggctgatgctgtccttggaatccctgcccttatctgacagccagggcccctctgactgggcactgatgctctctgcccagaggaagatggtgttcctcgggggccatgagacccctctgcaacatcacagctttgctcttgtttctctttcctactaaggcttccacattgtcaaaaccatgtatggggggagcagattttgcagccgaggggaaaattaccataaaacctagtctccgtaggtggtaagggatcaaggagcataaagtagaatgcctatggctaaacatgtccatgcttttcttaccttttcctttatttccaaagctactgctgttggcagtagaatagacatcacaggtgaatattcagtttaattatgggtttacatgtggctaccttatggctcgctgtaaggcaagaatgcctgaaatgtttagctggcattctttgtgtttctagataaagcaaaacatgtgctatgcatgctggacacgccccgtgccgtcttctgtaataaaagcagcaaccatatggtactgccggaaccttccagtatctcctataaacctcaagagccttgcagatctaaaactgcatagagagcacagatgctctggctggggtggcacaggtacacaggtggaagacaaaggtcaggccttatcgtgctagagcttacatcaggctaattcctctaccattgccaaaagttgaacttgactcacaattgtagagtcagcttaaggaacaagacctttcactgggttggatgtcgactttttgcatgtgaaagccagccagtattgcttatgccaactctctgggctaagtcccttgagaattagtttaaaaatttttgtagagctatagctccactctaggaatgtgaattcagcaagtttaattaataataataataataatgtcttattccattcaggctgctatcacaaaataccttagactgggttatttataaataatgggaattgatgtatcacaattctggaagctgggaagtacaagatcgaggccccagcagattcagtgtctggtgaaggctccgtctctgcttcatagatggcacttctcactgtgtcctcacatggcagaaggagggcaggctgtgtcctcacatggtgcaaggagcgaacttgctccctgtcatctcttttataaggctctgcgtttggttgaaggttatcccgaaaggattacttcccaaaggccctacctcttaatactatcacaccgggaatccaatctgaagatatgaattcagaccacagcaaatagtagcagcagctcacagctattcagtgcttcctccacaggaccgctttctaagtactttatgtactaacttttattcaaatctgtgaagaagttgactttattatccttacgttatagatgaagaaacggagatacaaggaaatgaagtgactcacccagagtcacacagatggtaaattggatggctaaatatttaaatggcacatgcggagagaagatattttgatgacagtttccataagaattggaatctatttttaaagtacagttatgtgtgtgaagggaatccaatgttaagtatggaaagtcaggctcaaggaaataactaattagtaattacatctttaacatttttaatttaaagtaatttaagattttcagaaaagttgcacacacagtacagagttctcgtacacccttcacccagcaacccccgatgttaatgcccttgtataactatagtacctgataaatttatgaaaaataagtgcttacagccaggtgcagtgtctcacacctgtaatcccagcactttgggaggccgaggcgggtggatcgcttgaggtcaggagcttgagaccagcctggccaacatggtaaaaccccatctctactaaaaatacaaaaaattagccaagtatggtggcatgcgcatgtagtcccaggtactcaggaggaggctgaggcaggataatcggttgaacccaggaggtggaggttgcaatgagcccgagattgtgccactgcgttccagcctgggcgacagagcgagagtccatctcaaaaaaaaaaaaaaagaaagaaagaaaaaataggtacccgcattagttactaggaatttttttaaagagccaaatagaagacatcagactcatcttatttcagtataaaaggaccacaagtggtactaagcagagcccccttggggcagtgcttgccaatgatgggtggcacccccatgcccattatctgcctgcaccttctcccaaccaaatagttcaggcatgggtttgtcttgagaaatgttttcataccaatagctaccatttattgagtgcttgctctatatttattgttcataggactggacctttatgctcagcattttatattcattgcttcattgactccccaaccaatcccatgaagtaaatactattattatcctccttcttgaaatgagcaaaggagctgagagaaaggaaggaaatggctccaagttacaaggtggaaagtgatgtagttggggccgcagcccgggcctggcttccacactcttgctttcagtgcataggctatgaatgttccaagtctctcttattaattagagtctcctttggaacaaacaattaacccataaatatttgctgaacccacaatcagcaccccacaaagttttttgaggtcacggaaggtccaaacatgggacttaaaaccaggggagaaaagagtaacacaagaagagaacaaagaacaacccatatccaagtaaaattaaataccaagtacatggtgatgaaatagcacacccttgggaggtactgagggtggggaaggggacagagagggaaggaccctgtggagaagcagccgactgaatactgtaggtatttgagagacagagagggaagagagctccgattgagagagtcagagggctgtgggaattagcctggtggtggctttcatgagaacacaaatataaaccataagccatcacatgcagagtttatggtccagatgcgagtgatttctcagaaaatgcacttaaacctgaaccctgagcagctgtgttaattgctaggttagttcaaactgtgtcttacctatgtagaatcactcaggttgaagataattcccaaagtaacgtagaaactcccgacaggagctctgcttcaggatggaaacctccgtttgcagtcagagatgagttttctttctagcttggtggggtatttatgggaaagccccgagctttggtggtgtatttttattttttgcctttgggcggtggtgctgatattatcagaatggtgtcggggtttttttttcttcttctgataggagattgtaataggttttctacactctagtgtgttttgtaaattcggtttataggagtagtaaaaaaaaaatccctcatgggaaccaattttcaatttaatcttgtaagtaaatggaaaaaatatcgggtgctttagagctgtttcaggagcacgtctctcccacagatagattattctgaagaagagtctaattttctcaacaacttgagtttgttaatttggtgtggagattgaagttttaaactgaactctggtcggggaggggaagacttcctcccagctcttacggcccagagactcctcctgcctacctagggccctgcgcgatttgatgtctgtcacccctgcagatatggagactcaccctcatcttattgtaattaaaacaataatattccctctgtgtgttcttccaccttaccatggtgtatttgttacagaatgaaggaaatgagcctcagctttgtatgataatcgttcattttttttgcttcacccattgatcatacattattgagcgtgtgtcctgctctcttcctggcaccagggatgctaagatgattaagacctagaccgtgtcacagactgtgtggtctttgggggagaattcaggcatgaaaaagaattggcgggtgctgtacctgcagtgggagtttgggagaaggggagcctcagtggccctggggaggcagcaggtgacagcttcacatcggaagtgcagtggagccgggaggacagggaaggaagaagagggcattccaggcaaagatgcagagtgtgttcaggaagctcagcaccatccaggatgtcaggaagttcaagtgagagttggagagagctggagggaagtttgtttctttccattttcaaagtatgagagctgcaatcatcagtttaccagttgcacaatccttaggagccatgcgcacaggctctgagttaaatatttctttttaaaacaggaagattttaagttccaggtagctacgttttcaacaagaacagagcatcagtctcctagcctgaactctacacatcaccctgagattcacagtgagcagagaccttctctatcattgctgggtaaggagacgcagcaggtagcccaacctttgcctaaaagctttgcacaggtaccttttgcagtgacaggcaggctgtggaatataataacttgttggaggctgccagcaaggagatgcaccaagctccttatttaaaggaaaaggcattagttggaagtcatttctgttcaataaatcttggttatgggatttggatccagatcaggaacgtagatggtgatgcagcagatgtatctgctcctttggtttgggatggagagggagagggtgctggcaagaagctgcttatcctcaggggcacccagagtgtccactgttggtgatcctgcatttgaccacctggttcagcgttctcagcagatccctccaactgcaaaggtatttttgttgttgttgttgtttgtaattaataaggaatctggatgtcatacttgatgaacagcaacctcccacctaatggttttaaccttgattattttattttttatttatttgtttatttatttttttgagacacagtctcactctgtcacccagcctggagtgcaatggtgcaatcttggctcattgcaacctccgcctcctggattcaagcgattctcctgcctcagcctctcgagtagttgggattataggtgtgtgccaccatgcccggctaatttttgtttttttggtagagacaaggttccaccatgttagctaggctgatctcgaactcctgacttgaggtgatccacctgccttgacctcccaaagtgttgggattacaggcgtgagccaccgtgcctggccaaccattcttgattaaaagagaatgaggagacatgattaccaaatgcaatctgtaacacttggttggatcctggatccaagaaaaaaacagctgtaaagaacattttggggacagtggggacagttgaatctggactgtattttagagaatgtttttgtaccagtgtgacatttctgggtggtaatggtcatgtgattttggaggggaatgctgaaatattttaggggtcattttttcctaatgtctacaacctacttccaaatggttcaacaaaagcaaaaaaacagacagaaatctgaaaataggaccaggcgggggttggggccaagaagagagcgtgtgtgcaggcaagagcacctgtggcggaataatagtgactctagaaagtgatataggtgttcactgtactgttctttcaacttcactcccaaaaacttgggcaatgatatctatgtctgaagctttgtttcagttgatcgtatttaaatgtactctgtagaggtcattcttggctagaaggaagcccctgctgaagcagccatcagagcgcctcagcagttaagcttccctgcctccaccctcttactctatgaccctcccctgcctctgtccatggccaccaacgcctttccttttgtggatggcagaccaaaggagacaattattctgcctcaacccaacgctgtgtttccttgtggttctgcactgaggctgggcccagaagcctggttcatgaagagcactcacctggcccctggcccctggcccccgttaaacaggtgagtcactgaccatttccttagagccacctgggactggctgcatgggacttgccatgacacagccggccagactgccacaggcaggttctgggaactgtacacttacatggatgggcaggggctgcctgggattgggagccactagtggtctatgtccccaagagcttgtatatgacccccattttccaaatagctcaggcagaaaagaaaatgtgagttaaacagctaaaggagtcatatgtaggtatgtgtacatatgtgtaagaagtaggctggacatggtgactcattcctgtagtcccagctactcaggaagctgaggcaggaggatctcttgagcccaggagtttgagacaagtctgggcaacagggcaagacctcgtctacacaaaaagaaaaaataaccagatgtggtggtgtgcacttgtagtcccagctactcaggaggctgaggcagaaggatcgcttgaacccaggagttcgaggtaacagggatctatgatggcgccactgcatgccagcctaggtgacagagcaaaaccccatctccaaaaaaatagtagttgtgggcacagtattggcaaagctgttgcttattgtataaataaacatcaaggagttggggaatggctgagtgggccgtttgcattctgcatctcccctccccttggataccactctcctcgatctgggggttccatgcctactttaaagacaccagcttctatttcctgcaagtttccagctcttaaaaaaaaaaaaaaaaaacaaaaccaacaagctttatgatgctcacatatgagaaactacttcctttagtttgtctttaaatactggtagagaaaagtccataataagaggggtaactgctcttcatgacaaagcacactttatctccatggctttgtagaagtttcatgaatccactaacatcagctaattctgaaagtgataggcattgttgcattaattttccctggggagaggcacagcaagactgggtcctctcttttgtagatggagaagtaagaatgagtggggcgttcagtgttcttgcagagaggattggtgggtccgtttagctaggaagtggtcgcaccatctagccaggggacccttattatccaatgatctctatgtgcctggcatcttgcaaatggaaatgctaacaagatccagccagtcacagcagtagcagctgcctagaaaggggacatgaagggcaaaccagagaagctccgggtgtttcttgaatgcttagatcctgtgagaagagaaaccgacactgattgaacacttttcgtgtaccaggccccaactggatgctttcctatgtatttcatcccaaccaccttttgggaaaaatgctatcatcatcaccagcagcagcagcagcatcattacccttttgtaagtgaggaaactgaggcttgtagagctcccgcagcctgcccagctgcctctagcacacacgcatgcccttcccactattgtaagcagctgaccgttggctctggctgagggaagatcctgtgattactcacagctgtttcccttgagtacagacacagcctacactgttgcttcaagtgcttgcaatttcacatttctatcctgcaattaattgtggaggctactctgggatggctccgcagctcctgtgattactgttctgttggcaccactgggggtgagggtctgtcctcacttccgcagaccctgcattttccagggtttccataatggctggaaataaaaatggcagcagggaatctgggtgaagtcttctgtgctggaaaatgaagaattaaaatgggcagaaggatggaaacaagccgctacaggacgtgttttgacagcatgtgagttgcgtgggcatgtgactggaccagccctttcttggcatccgtctggctttttcttagtggccccagttcttccccattggagactcatcctgctctcacgttctcacagtcttcaaagaaaccaaatctagcagtcacctgccttgagttcactggtgcttaacatccaggcacatccttggcacaagaaaacaggaaagtgcgtcttagctaaaacatacagcggtgtgcttgtaccagaagaaagcctgcacattatcccattcaaatgcgtatgcttttgggtcatgactggcatgtgttcagtggatttatctactctatcttcttccttgattgggcattcctaaacatcagtgtcttatgtccacatgaccccttctgtaggcagtactttgcccatctccccatatttaccccttatgtcccctacacgtttgcactcagatttccaagccatgagcagcttccccactgtggcaggcaacagcccaccagtgtttcttccctcctcacttttgcttgtgccattttccctgctccccagagaacgtctttttaacattcagctgcagttacctttaggaagcctctcctcacattttatgccatgcctgaaaccaaccactttctctccatgccctttataacatgtattatgagatttcacctgtgtgtttatttacatgttgatctccttccactatgtcataagtcctttgaggtcagagatagtgtcttatctcctgtacccagcccagtgcctcaaatttgtaccaaatgtgtgtctgttgagccgatgatgatgatgatggaagtacacaatacagcatagaaactgactcaggcttttactgcactcctcaccccaaatccaggtgactctccccattttagccctacatctggatcaagttaaaatgatcctgttttaacccaattcataaagccacatggctctgggatcctttagagaaacatctatcagctaagaaaaaggttgcatcttctcagagacacatgattatttacattccgactgtggtacctcgtcctgactgatctgtggctcatcttaatgtcagatatgtacagacttgcagcatgccatcccacagattgttattcatgcttggttctctgtgcggggactccaacagagcttttcactctgggtgcttagtcactagatgtgcgtgggaggcagcaagattggaacaaggggcaaagagttgccagtgtcatttccttcatgcagcatttgtctttgttgtaaagcaccctggtatccatgctcatggtgacatagtttctctttctcctgcttaagataccccaagtccccagattctttatagggtcatcagtcatctgtcgtctttgacttcagtgactgctgccaggaggaagcactcttaaagataggctttgaatgcttacatccctggaagaggagaagcaaattatttctggggcctctttcaagattaccccattagcatacagagacattgatattgactgagcaggtcattcttgtgcaggattttaattgcttctaattataggattatcatttaagcacaagattaattgctgtgaaattattgcaaggaactttatcttctggaaagtaaatgtgttagccaagtgagaaatctcttagaagcttgcaaatgatgtcttttcaatcactttccattgaaactttcttctaatgcttggggaatgagagagagatcttgggggatcaggagggaagacgaaataaataacagataaatgctccttttgtttcccggttctccatcaaaagggtggaaaacttgaagtgtttgggaatggttatgttcaccaatggaaatgtcctaaaataaatgcagaaatttttttcctctcttgatccatgtcatcttcaacggtgggtgggtaggaatggctcagtaggaagctagaataggcaggtgctgtcctatggtccttttcaacaccaagctgctctgatatcttagcaaaaaatatgtatatatatattttcagatgtgttgtaaaggaatctcccattaacatgtatacacctgctctgattattggcatcaaaatggtacagagaaacatcagactatgtgcatcttagcttgtaggcgtttccaattggaaagattcagatttcctgagaaaatatgagataagttagctcctgagcttgttctaaaatatccccatttgaatagggggccatggccacccactggaagctctgcacagagcatccccatgagggactttttatactgagaatggtagctgcctttacatgcattttcctttttaattaatgcaaggtttgtggttaattaaagatagtcagggtcccttttcaaaccaaagcaggcactttttcctagaataaagaagagagaatagaagcaaggcaaacttcctataaaagtttttgcagtgggggtggtgaatttggggaatgtggcctgaaggaagtgttgtttcatcaacttcgactcacttgaggtagggaatgtaatcaaaagagacaccttcctcactgaacacccagcagggacatggctctttttctgggaaatgccgcactgacctccctttctctttgttaagtcactcagctgggagtgggggtacagtgcaggagagacacatttctctgggatatattgctgctgtcatcttatggcccgcacaggtggaagaactctcgtggaagaactctcacaggtgaacatctgcccaaaagagcaagtgtatgtgcagtgaatgttagaaatagcaccagagccctccttactctttactaatacccaacctctctgaaagaccctgaagtctgtttcaatccctcccaccccaatatggcagggactctgttatccttaaaacttctggcttctgaaggatgctagtatatatttgaaaaacaaaaaaatcccagcatactttacatgaccaacactccataaagaaagaatacagcaggcttgtgtttataaaataatagaagtgacttgcatttagaggatactatggtgcattagtctattctcattctgctatgaagaaatacccgagactggtaatttctagaggaaagaggtttaattgactcacagttctgcagggctggggaggcctcaggaaacttacgatcatggcagaagaagaagcaaacacatccttcttcacgtggcggcaggaaggagaagaagaatgagagcccagtaaaggggaaagccccttataaaaccatcagatctcagccgggcacagtggctcatgcctgtaatcccagcactttgggaggtcaaggtgggcagatcacctgaggtcaagagttcaagaccagcctggccaacatggtgaaaccccctctctactaaaaatacaagaaattagctgggcatggtggcagacacctgtaatcccagctacttgggaggctgaggcagaggcaggagaattgcttgaacccaggaggcagaggttgcagtgagctgagatggcgccattgcactccagcctggacaacaagagcaaaactctgtcttcaaaaacaacaacaacaacaacaacaacaacaacaacagatctcattatcttcacctcgtccttcctacaacctgtggggattatgagaactacaattcaaggtgagatttgggtggggacacagccaaaccatatcatatggcgttgactttgaagtcaggtagactggatttgaatcccaactatagcactaattaatgttgaatacgtattaggggttgttactctattaatggagttttactccagtcacgttaagtcatgtagctcaatggactgaagcatgtcactttattgacaaattaactctttcagtcctgactctttcatggtgtagctataaccacagtgggactccagcagccccaaccaagaaaatctaaccccagacctcatttgttttttcttcactatgcccaccaagcaagacacaggaacacactgtgaaatcactttcaaaattggaaggcctctgtatgagtagaacagttgcatattaagctgaggatattaaccttaaagattttaactggctgtgaaccttgacctcatggcttaacctctctttgtttccctctcctctgcaaattcagattaaggcacttgaactacatgaaccctgacgttcccttcagctctggcattttgttgagagctgtttcagagagagctaatcggtggtgccaataagtgtgccccttcgtgaggaactgatggtagattggagactctagggactctgcaaatggatgaggcctgagaggctgctggtccggtgattttcaaacaagttggaacatcacatcttgtttgagatgatattcaaatgatatttcaccagagttactctgattgaagggaagaaaatagggtactcaccttcttcctcctcctccaccagccatgaggagactctgtggagcagagtttgaaagtcaaggatgtaggctgggtgtagggcctcacacctgtgtcccagtactttgagaggcggaagcagaagatcccttgaggccagaagttcaagaccatcctgggcaacagaacaagaccttgtctctataaagagtaaaaataaatataatttaaaaattaaaaataaaaattagccgggcatggtggcacacatgctgcactttggtcccaactactcaggaggctgatgtgggaggattacctgagcccaggagtttgaggctgcagtgagccaagattgcactccagcctgggtagcagagtgagactccgtcacaaaaaaaagaagtcactaatgtgattgttatcacactgtgctggggtccgtgcaccccatgcagcaaagccaaatgctgatgttgggttaacagcaggagaaactgaggcgtttattgccaagcaaggagaattgagcagctcgtgctgatgacttgaactggcagatagcttacagctatccattatttaaaggcgggaaggtggaggttacagtcgaagtcattcagtacctgggggccacatgttggtttgacccaaacaggtaggacatcccaaagctggggaggcggtgtgccacagtcatggctggattcaaagatcttctgatttgtgattagttaaggaggcgaagctttgtctaagaattagggatcaacaaaaaaaaaaacaatgttagctctggcttttgggtacaaaagcatcgaagggagatggaagaatgtagaacaaagaacagcagtcagagtgctgtcttctgctccccccatccaagggctgtgtgccagtgggtccgtttggtgggggtccagttttctgaaacaactcaagggcatgtgtttagatgttatctttaatttctacagaaagcaaaacatctcctaacttccttgctgttgttttaacttactgataccttcttccttgtcaagttgctcatttaattctcaaggctacctaggtgcctggaattttccttgaaggaactcaagattttcctttatttccatgttagggggtgctcctgcccggggaccctctgaaaattctgtcccatggtccatccccttcattttcatgcataaaaaccacggctcagggaatatggctactatgtagggtctttggggttataaaggataaaaccggccgggcgcgatggctcacgcctgtaatcccagcactttgggaagccgaggcgggcggatcacgaggtcaggagatcaagaccatcctggctaacacggtgaaaacctgtctctactaaaaaatatatatatataataacaatacaaaaaattagccgggtgtggtggcgggcgcctgtagtcccagctactcgggaggctgaggcagaagaatggcatgaacccgggaggcagaacttgcagtgagccgagatcgcaccactgcactccagcctgggcaacagagcaagacgctgtcttaaaaataaattaattaattaattaattaaaggataaaaccaacccactcaggtagaagggggaattagcaaaagaaatctagagtatcgtgaaacgcaagggtgggaatgccttggagccataagaatactgagaacccaagattctctttctgtatctcacctcttctttctccatactgccttcatttgtttcttttccacaacacgttagactttctttgcattgcagaaaacatggccctagacgattctacagcttcgcctcttgcagctgcatgtcttctactgtgtcagtcacaaatccaaaaattctgggaaagggattcatcgactcagtgtgggtcacatgccaccctggaccaatggactgtgactggagggcagatatggggtggggtgggaggtgggagacattttcaggaacaaggaatagtgagaagcagacaaaactgtaggtaatgcaacactgccatgaaacgtgagccagggttgtgcaggaagtgtgttcaggaggaggatgcagccaggctcctgccttctacttcgatgctcctttccttcaaccaccttgcacatccgtgaaattactcaagagggacagtggctgagcttatgtccaaaagttggatatgactcatcagttccttttgaacacgtcaacctgctcctggcctggctggtctccaaaaacagccaagggtaaagaaaaaaacttgattgagtgacatttgtccaattcagccacccagtgcattaatcaccctttttatttagaagctgtaaaacagcacaacaggttccaggcgtaaatggtgttgatgtggaagagattgagtgatggtggtacccgcaggaagcaagtcctttgaatgggctcacggggagattgtggaacaagtggctcaggaaggtggagctgtttgatcagggcctaggaactagacaaggccctccagaatgcattttgagccattggccttaaacaaccttcccctgcggcagctttttctgcaggccacgttgctgccttggcagaccctcaccccttacccctggagcttttctttcacgaggaattcctactgcgagaataaacaaaggtagttggcagcatgctaacaatgcctccaggttcttagcctctgtcctgagaagagccagccaggcaacctggctttcattcagcaagggaagagaaaagcaaggtaccttttatccctgaatcatcgccacaaggccctctcaggtcaggaaactgatgtgtctcctgcttggtttgtaaaccatgtggatgatacccagaatatcaggtcctctctctctcttccgtccaaacgaaagcacttagatgtcacatgcccaccttgtaagtcctcatgggatttgggatcctcatcctgtgcacagaccttgactcatgggctctacaacattggctgtcttcctgtttaatttccctttctactgacagttttgccaattcagtgatggctttagcgccatggctcagcggcacccaagcagcttgagacatccgtggtttgggggtcatcttagttatttcatggaatgaaaagttttacatccaagatactcggcccccagtcatttcttttctgtatcaatttagtctctctttagttttggtgcatgtggttgacttgtggtagtctaaggtgttgacggactggcccagagagagatctcaaagctagtgagaatgtgtccaggttcttgtttgattttgttttggtttgattttgattgtggtcgagataagaggcttttccaggtgaaaatctcgtaggcctggcatcatacctgtaattaatgtttatcttctgctttatactctcagattaaagacagcaatggtataacagcaaggctggaaagaataaagtttactcctgttttatctctctctccaaacaccgtagtgttccagagacagatactgatagtctcttgtgctcatgaactcctagtagctcctgataagtacatttctcagagaatcagctctgagcccatttgtggggaacaagtgtatgggaaagtcgtcgattctgcaggtgttgggaacagttctgtaatgggatagcagatccctcttctgctggcggatggaggaaggatacccttgccggtggacagttgcctcctaatcaggaattatgcctcatgctcagccagggccttccaggcaaggaagccgagcaaagcccactggaagacagggctccctcgggcacaaacaagaacagcttcctgctcctctccagcctcaaaggttcatgcgccttgtccctcagataaaggtgctagaaagaaggttggtgtcactggacgtcgtctcttagggtgattcagctacttcaggcgaggggttgggaggaaccaataaatatttttgtctttgtttgccacactgatgtgaatgcttataattttattagcagctgcctgggagccaggcctgacttaatttaatttaatctcctgggttatttcagttcggtttagtctattttaagcacagatgaagaggaaataatcagaccgaggggaaagatgagggaggggctggaggggccatccgctgccctcgctagttcctcaggcttaacttgtcttgatataaagggaatgacttcatggaggcaggttagccagacgaagttctagctctcactgtgttttgtctctggtatcatcaccttgttctctaagaaaagaagcatgatatcagctttgttgggggagggaggatgggggatattaattatgccactagaaatacaaatggagcaattttcttgtgccaggcaggactgaatagtgacaccttccccggccctccctttctccttttagcaaactcactgatcactgtgttgtggtagctctttctctttggagtgttttttgttgttgttgtttggtttgtttgattttggggtttttttttttttgagacagggtctcactcagtcacccaggctggagttcagtggcgtgatcttgactcactgcaacctctgcctcccaggttcaagtgattctcgtggctcagcctcctgagtagctggaactacaggcacatgccaccacgccctgctaatttttgtatttttagtagagatagggtttcgccatgttggccgggcaggtctcgaactcctggcctcaagtgatccacccgcctcgggctcccaaagtgccgggtttctaggtgtgagccaccgcgcccaaccgtctttggagtgttttgatgccctgggattggtggtttgggaggcaggatggcagagcctccgctttgagcagtttcttctgagtgaatatgtggttcagaggcccactcagcgaagcccaaggcccaaagaccaccaagtcctgtggcctgggctgccctgcctgccctgagcccaggagctgcgtcccaaggccaccccatcatttcctgcccccagggcctgtgaggctgtgcatttggtttagtaccaggaatcatcaagaacaagagaaattcatgggcccagtcagagaacccaaaggtaatgagaatgtccagagggtttttttgttttaaacagtgattgagatgataagaggtattgccaggtgaaaatctcttagccttgacatcatcaaagaagagagattcgtcatctcatgatgaagagagattcatctcaatttcttgtttctttggggtttttgttttgctttggttttttttttttttttttttttttttggcaatgtcttgctgtttcactcaggctggagggcagtgttgcgatcatagctcaccgcagccatgatgagctgccgggctcaagtgattcttctgcctcagcccctgtagctgggactaccacacccagataattttttaaatgtttgtacagatagggtctgaccacattaccaggctggtctcacactcctggcctcaagcaatcttcccaccccagtctaccaaagtgatgggattacaggtgtgagccactgtgcccggctcattgcagttttatatgccaaccctgaaagcagaaaattgtatccccactgaagtgctggttccatgaacccaggatttttatgggtcttattcattgcagaatccccgaactcatggtgcctgggacccagcatgttctcagtgtgtgtccgaataacactggagggttttttctggatgatactgataattacagaagttaagagttattaagtgcttattttgtgccaagcactatgccaagggttttacttgtataatcttttttaatacttaaacggttcctattgcatgaaactcttaccttcatttaaatggaggcatagaggatttcaggaacttgccaggtgacaaggtggagctagaacttgaatctaggcagaacatttttatctgtgtcctgagagtttccatgagaacatgaccaaaaggttttctggtatacgctgagtcacctgcatgagtgttcattcagaaccatcctcccaacaccctgcacagtggagatgccctgagaagggagcatcgctgggcttggggctgagtgtaggagtggcaagagggggtccaagtacctcccatggctcattaaagtcacctgagtagacctgctaagcactcactcctccatgccggatttctcaaagtgtgctgctggtctacctggagtggggtagagtacttccccaccccaggcttcctgaatcagattctctaagaacaagcgcagagcctgcaagtaaattctattgttagtgagttctccaaggtggttcttaggcacctaacatttgagacctgcagctatgggtatttttgctcctagccttgcggtatgttagatttacttaaaaacatacaagtgtctatatgtttgggatggtgttggagggaatttattaaaactagagttcttctttatccagaaaagcacacacattaggaaaggcaatagcatctgaagacagaggagtggcgtgtagctcattttggcctttcctgttgaaggcccccaggttcactcttgggatgaccaggcccctagagaccaattccaatgtagtcctgactgggcagtccatcaggatgccagtttatgaatttacagagaacaataaagttgaccatgtgacttgatgagagcaatcagtgtagagaagataccaggcaaggcataatgaacccattttattgatttgtcaaattaagcaccatcacatagactacatagagcagaaatccgctttgggagtgccttctcccctacagacaaacctgaggggactcagaatgctgcctagcaaacatagaattataacaaggggatgtgataaatgttggatggcagcagactaaggtttaacattcatctcaagttagaggcggctgctgtgctgctggggccagaagcacttgaagtcaaatgcttagatgccgctccttggacctgtgtcataggctctgctgacatttgcctggagcctctgctttctcgctgctcatttgaacatattcatactggacacaagctggtcctacaagcctagtacctctcagaaccctctctccttcaggggactttgagaagctctgctctgatccaatattgatgaatccagtagtttgttgatttccaaagaaagatcttgctttcctcatttcctactacccaaggaagggagaatcacctcattatggctccaaatttcaacagatgttatataaagggctatataagtattcctgtatcttcattctttgcaaaaatgccttccccaaaatctgactctttgtctgtcagataaatgatatgtagaattttgtatcttaccttctaggagaaagagtagtcgtaactctccatgcctctccagggaaccctttgaatcccccccccacacacaaatttagagattatttccaggacaaaggactatatgaaggacccttaactatctagtacccagactagtaacgtagactttggtgataccatgaaaacgaaggcataatcatgtgctatgaaaatggattaggaagcagcttctgttcacagtagaaagaatcttagagatttccctgtccagccaactcctttgttttccagactgaatataaaaactcactaaagattgcccaagaaagtgagcagcaggacagagcaagccgaaggtccctgcccagtcccttcccccacctctgccaccttttaaatcccatctggaatgtctgcgtgtttagttcagttggaggttagggatctaggaggtaaaatggccaccaggatgatgtcaaatcgagttaaacagatacagccttggcctttaaagaacagaccacactggaggcatatgtattcatccgttcttacactgctaataaagacatacctgagactgggtaatttatcaaggaaaaaggtttaattggctcagagttcagcatgtctagggatgcctcaggaaacttacaatcatggtggaatcttcacatggcggcagcaaggagaagtgcagagtaaagcagggaaaagccccttataaagccatcagatcttgtgagaactcactcactatcacaagaacagcatggaggtaactgcccccatgactcagttacctcccaccaggtccctcccacaacacatggggattaggggaactacaagatgagatttgggtgcagacacagggccaaaccacatcaaggaaccacattcaaaagccacccacacagggacaagttaacaacatgaaagcaaaggtaagagtgtctgccatgagaactgatggtaggcagcttagatgtgaagtgagtggccaagagtaatttattcctcttccaattaaccagactttctagaaacagtggaattccaagagctacttaagaaatcgagatatccttgcatttctggattgaattgcggtaaccagttggtaacctctgaaatgcaatctctcttatgtccctctgaaatgttaagaagattcaggaagtgacagaaacccacgatcaagactggcaaaccacttactgccaccttggagaaatttctgttgcccgttagcccagtggtcaagtgttaagaaacaattatcagtggtctggccatactggatgcatgaaaaaaccaaagtcctgcacacctgaaagaaagcaagaagattttttgggcctccccttttgctcagataaacagggtcttcgaccagccaaaaaacctgggaggcactcctttgctatggagtttctctcatttcagaggaccaaaatagtgtcttctctcatctttccatacagtctacaaatagactgtaacttccaaaggaaaaagaaaagggctgttgttggtgagttatgtcctgagggttagcagctctgcaagcgaagtatagtggacacaggtgtggaggtgagaagaacttcagggtcaggggattctaactttaaacggacttcacagattcaagatgtgtaattaccaagcactgtgaattggaattaccaagcactgtgaattggatatgatcctacctggctccagcaaaaacacactcgtcattggactaagagccatgaacatcaacttgagtgccctggaagagggaagcaagttctctagtgtcccagtagacagtggatagagccaatgtggcatacaaacagtatctttgggcaaataacacatctagatgtacttgtctttgaggacaagtaaagaaagaaaacaaacccaaaatatggggcccatttttaaaacatgggagataaagggatagtatcatggagaacatatttgaatatagattattggaagaaaagaaattacagaagagtatttgagaaaactccatacacattataatagggtgcaggaggctgggcacagtggcttacacctgtaatcccagcactctgggaggccaaggcaaaaggatcacttgaggccagaagtttgagaccagcctgggcaacatagcaagttctgcctctacaaaaaaatttaaaaattagccaggcatggtggcacacacctgtagtcccagctactcaggagattgaggtgggaggattgtggagcccatgagttcaaggctgcagtgagctatgatctcatcactgcactccagcctgagtgacatagtgagaccctctctttaaaaaaaaaaaaatgcacaatctctgtaaaacaggaacataatgccatttgaacaaacaggttgagaggaaaagcaagcagaatgagattttttaaaatgatagtgggctatataaagagacagaaaagatgaaaggaagtggacaagtaaatgccagtttccagtaaggaaatttatagtacataattaaaatctttgtggtgcaacaaacagcagaattggcattgcagaaaatcaaatcagcgctgtgcaagaatcctgggaagctcttctagaatgcaggcaaaaggacaaaaccatggtgatgaaagagagaataatgaaaaatggaagactgggaacaggatataaattgagaataatagctttgtcccaaagataaaagaagaaaaaattgaaaaagaagcactaattcaatatgataggaccaaatttatggagcattcaaatgaaaaggaatgcactctgttcctacaaaattaaccaaaagaagtctgcatttagaagcattctgggctgggtgcggtggctcacacctgtaattgcagcactttgggaggccgaagttgggcagatcacttgaactcaggagttcaagaccagcctgggcaacatggtgaaaccccgtctctactaaaaatacaaaaaattagctgggcatggtgatgggcgcctgtagtcccagctactctggaggctgaggcacaagaatcgcttgaacccaggaggcggaggttgcagtgagctgagattgcgccactgcaccccagcctgggtgacagagcgagactctgtctcagaaaagaaacattctggaaaacttttaattacaaagaaagaaaacaaatgtcttttcttcagaatatataggtgacctacaggagaacaaaaaccaggttgtcactagacctctaatcgtatgcactactaaattttaagagataagaaaacatcacttacagagtttggaagaacaaagtgaattggccccaaatttctcacccagccaagttgccagtcgtggcatattctcagagatgcaagagctcagaatatacatcacccacactttcttgaaaattatttaaaggcgagctaaagaggacggcaagatgaagtaaaattaaaagttcagggatgggaagtcatataaggataagcagtaagcactaaaatcagttgaacctgttaatgtggaaaacagctatcaaaactgtaactcatataaaaattatgacaagcattagagatcccatactccagataattttacagtaacaaaaagaggaagtaggatgggagctcacagggagtaagaacagagcatgcacaatgcttcatacccttggggagaggagtcagaagatgctatctcattctttcctttggtgatcggagaaatgtaggataaaaaatgttttggggtgaatcttgagatagtcagcagtagaatttaaacaacattttaaaaattttggccgggcattgtggctcacacttgcaattccatcactttgggaagctgaggtgggaggattgcttgaacccaggaattgaagatgggcctggacatggtgaaatcgccatctctacccaaaaaaaacacagaaatgaccggtgtgatggcgtgtgtctgtagtcccagctactcgggaggctgaggtaggaggattgcttgagcacaggaggtcaaggctgtagtgagccatgatcacactactacactccagcctgggtggcagagtgagactctatctcaaaaataaatttaaaaaaattatagaaaaaataaatgcaaagaaaacagagtatagtaaaagagtgaaggctgggtgcaatgcctcatgcctgtaatcccagcactttgggaggccgaggtgggcagatcacaaggtcaggagttcgagaccagtctggccaacctagcaaaaccccatctctactaaaaatacaaaaaattagcctggtgtggtggtgtgcgcctgtaatcccagctacttgggaggctgaggtaggagaatggcctgaacccgggaggcagaggttgcagtgagccgagattgcaccattgcacaccagcccaggagacagtgggagactcatctcaaaaaaaaaaaaaaaaaaaaaaaagactgaaaacaaagcaagtaactaggagacagagggacaacaacaagtgaagctccacacgacagaggcagccaagaagtgggggggtttaagaatgtactggaatggggctgcctgtgttttcagcccctccccttgctagctgggtgaccttgtcctaggtactgcttaatctctccaagcctcagctttcctcgtctataaaatgtggataccaagtagggttattgcggaggttagttaatatgtccaaggtgctgagtaccttatcaggtacgtacttgtgggtacgaatattgaggataaggtaacagattaaactgcccaccattttcagatgggatgttttgctaaagttcagcgatatcctatgaatgagacctacacgtaaagtaaaatgacccataaacactgagaaaaaggatgggcagtgatttatgagatgaaagaaagaaagcagtggaagtagaattgccccaagtcaggaaactctgtgtacctggatggagaaagccgagtcgggggcttgtaccactaacatgcattggaaatctagaacaatttaaagtctaagcttgttgcacaaattagcagaaagttgaagaagataaaatacatggccctgaaaacagagcgaacattaacaaacagaagccacacagaccaatgggaaagatagggcttattccactaataatgttgagaagttgtctaaacatttggaggaaaataaatgagatcttctttcacactgtacaccaaaataaatttcaaatggtcttaagagttaaatataagaaagaaacaaaataattaaaacttaggtgaatattaagctaatctcagaaagggcaaggtttttgtaagcctaaaagaaatggaaaaaataaaaggaaatgtttgacagatttaactacataataagttaagcttctctgtttctagaagaatggtgacatgtaacacagtttgcagcaactatgacaaaaggcttttatcatttatatctcaacaactcttctaacacagtaagaaaacttgttactaccttctagaaaacttgaataaggagttaagtcaggcagaaataaatacaaatgggcaaataaccatggaaaaaaaatttaacctcaaaaataagaaagtcaaaattacagtgttattctttacttttctcaccacttcttgatatggttttggtaggattgtggtaaacttttagaggagtaatttggcaatgtatgccaagaatcttgaataatttccatcctttaagctacttccaagaatgtattcttattcttctttgcatcagaaaatctgtggcgttcttaaacacacagggtatgatcagacttgcacagcataaatagaacaagaaaaaaagtatcagaaatttcaatgaatatttatgcatgaagatgatcagttgctatgttatttgtaaaggtgaaaaatgataaactttgtagatgcccccaaacagggaattgattaaataaattctgattagccataaaatgagatgttagacatttaaaatgttttcaaagcatactttgttataaaggcaggttctaaaactttattcctagtgtgatgtgaattctataaaaataaatatttcaatgtagatagatgtggaagatactggccataaacatgctaatgtgccaatgttggttctcccatgcagaagtatagttgttttagttttcttctttatatttttatgtctttaaatttcttgtatgatgggtgcacccgttactcctataataagaaaaaaattttcttaaatatcttcctacgttgtttatgcagaatcgtttcagtctctcataacctgggaaatatttctctcacaactaggtttcattttcttttgaaacatcagaattatagaactttaatgtaaaattttatgtcccactaattgtaaaagggaaagtaatgaaatatttatgatctttttccaaggactaaacattgttgtttctcatcttataccacagtcctccgaattctcttatgtaagttttgttccagtagaattttggttgatgagttgccaacctgtgttttctggtacgtgaatgggacagaaattcactcttatcaccaagcagccagcctcaccagcaaaatagaatattcactaaataggttccaaataagaaaatggttaatgtccctcagtccaggtttgtgtacagggccatatgaagctgtgaggcgatgtctgatcaggtgtatttttagtgtatctcattattcttgcctttgtctctggtaataaggaaacaaatatcacaaaatttaggggtcattatttctaaacatgaaagagatcacatcagaaattctgcaacattcataaacacagacggtgtcagcagacttgatacagcataaatagaacaaatgcagtgaactagacagcacccagacccagtttgtacacagaatctcagtctataattacccagtcaaaaattgttcatcgtggttgatgacacctgtgcattttatttcctgaaatctagagaagttccacgtgatcactatttaaccaagagcaaaagtccctttctgacccatttttcctgtaagtggagatacatcctgtgctcttttgtctttgtgggtacagagattctttcttcaaagcatttaacattttcaaaaaagtgtgccactccttttggcctggctttcttcgcccgtgaaaaggcctgggtggtttttccttgtccaagagtccctccaaatggacgctttatgtactgcaaccaagagctgagaagtttccaagctttcctgtctgtgttagcattccggtcattcagcaggaatccaatgagcgcagattttatcttgtctgtcctgtgttgccctgggggagtgatccctggggatgcgagggggtgtggcccttgccctcaaggtgctgtcagtctgtagacatggaacacctttgggctgggctaggctggcaggagagtggaagggcagaggaaatgggtcttgtgcaaggctaagggctgacagcactgagatggatggaggagtgtccccagcgatggggcagtgtggacccagaagcacagagcaaggtgggcacagagatacacgtgttcagcagttactcagttcacgcatggtgctgtgctgggcagtaggggttcaaaataactaaaagagactaaccttgttggtgtggagtggttcttttgggttatataaatactaaatgtgataggttgcatgcagttaaatatttagcatatagaaccaacccatcagaaccaatgccagctcctaagtcataccagcatctgctaggggaatgtgggccagaagacggagcgtcactgacatttagatagaggtgttcaagtaaatggtaggaaacagattagaggcctgttttccatgttgggagcctaaaagatacagtaaccaagtgccactcaagctgtggtagagaatatctcagttctaacttgttaatgggagaagaatatgattttgttgttgcttctggccaaatgattccagtgaatcagtctgatgagtggcagtgcctgggctgccacccacaaccaactctcacctgtcctgtcgactcttcattgttcatgcttgagaaatcagttacctccttatgccatggagggcctgactgcagtgcacgcccaccaatgggaagtcgtgcccacaccagtggcaagatatgccaccaccatcatggaccaaccacccaacgcctcctatccaaaggcagatcccagcaagcacttgctctctgttgccgggacttctcccagctccaaaactgccttagtctgatctattaatatatctttttaactgggtggctcataaacaacagaagtttacttctcacagttatggaggctggagactccaagttcagggcacaggaagactcagtggctagagagggcccatttgccgacagccccacatcctcacacggtggaagggcaaaccagctcccttgggcttctcttataagggcactgatcctctccatggaggctctgccctcctggcctaatcacctcccaaaggcccctcctcttaatgtcatcgccttgggggttaggatttcaaacacaaattgggggcaggaggcacaaacattcagaccacagcacagagctcttcccatccccagccgaagtaggaatgacccagaggaaggctgctgtccctttgcacacaggttctgaaagtgcgtggagagaggacgatccctcggtccctgcagaaccaggctcttgaagcatatagcagaggttctctacccagggcctaccctagaatgtcatcaaaactgcagtgttgtattaaaggggtgcatggcttagagagaatggagaatgcccagcccagaggcccagagtgttttaggatgtgcctgttacccaaagttaaaatctgtatgcgtcaggagtgacacttgggagctacacttcccaaccccctctcctgcggccaccggagcctgcctgggccccttctcctgaaacggccttctctgcccacataatagcccctagcgatgccagttctggttcctccgcggggtcccacgccagctgacccagcagtacctgtaacgtgtcccacccttgccagggtttgtgtgcctgcatggttttagaggttccaagtcagagcccctaaaccccttgccttattgctagacagcttgaccgcccccggaacatcacgtgggaagggcgctcggtaaatcctgttctggaggcaatctgtcactccaccagtttcccaatcaacatttgccgaggagttctggctcccggtgcagaactgacttgtggcgacgtgagggaactggcagcttcttagacccaagttctccctcgcagcatcgtcagaagaggcccaaagtagagacgcaaacaaaccctgagaacagcgtgttcttcccagtaacgtgaccgggaaaatgtgagccagaggaaacttgagagctccgtggtgcggctgagctggtggggtgagggttttttccctttttctatctggtccagcccatcggccacttgagatgctcctgaactgagtaaccaagctgttcggagggtactttctcagcaggacaagccctgagctctggaaaaacgcagctagaataacgaggaagcagaggggcctctcccacaccaggcttgccccgacaggtcagcttgcttgtggcccagcgctactgcgcacatgttcctttaagatccctatttccgaggcagccgtggcataattaaagaatggccctgtggatgtcctacggtgctcactgtttgcacttgcttctgggtggggctaaggtgtgggaccggccggggaagcctgaacaaggtggggttggccaattgcaacaggtcacagccagatcagataccctgaggaggaggctgtgagtcatgtttgtccagaagtgccaactgctgcaccagaaaagccgggagaaaagaagcaagcgtaaggtgcacatgagaggtgctggtttctgaaggttctgttaagacaggagaagatggatcatagttcctgtcaggagacacaccctctcccccgacccccagcccagaaccccttccttgctttatagcacaaggtgaaagttcagaggctcagctcaaagcagaaggaacctaagggaagtagagcgtccttttttgtgtcactttctcctcaaacaactcactgtgttggtggggtagtgtttgttctatgctgggggtcagcaaactacggcccaaggtccaaatctggcccacagcttatttttatttatttatttatttattgagactgagtctcgctctgtcgcccaggctggagcacaatggcacaatctcggctcactgaaacctctggctcctgggttgaagcaattctcctgcctcagacccctgagtagctgggactacaggcgcacgctgctacacccggctaattatttgtattttaatagagacgagttttcaccgtgttgcccaggctggtctcaagctcctgagctcaggcagtgcacccaccttggcctcccaaagtgctaagattacaggcgtgagccactgtgcctggcctattttttaaataaagttttattggaacacagctgcgttcgtttgttcacatatcgtccgtgtctgctttcgctatgcaatagacctgaatagtggcagtagagactttgtgacctgcaaagcctaaatgactggtgatctggctctttttagaaaaggtttgctatctcctattccacactaataggtgaacctgaatgcagaggtcaccttgtgaggaccacacagaggttaatgcccaggccccctgaggcaggactgagttgcactcctgactccatcccttactaaatgttcaaccttgagcaggtttgttaacatctgtctgccttggttttgtcatctggaaaacgggcatctgagtcattatttcacaggagtattgtgagtattaagtgagtgggtgtagtaaagcacgtggaaacctgtcagtaaaggcctctttgttaattcagatataactcacaggtcataatattcaccctttaaaaatgtacagtgtagtggttttcagtatattcacaagattgtgcaatatacaccaccactgtctaacccagaacattgtcatcacttcaagaagaaattcctcagtagtacttgtagtaggatgaataaccaccacccaaagacatcagatcttaatccctggaatctgtaaatgtgcccttaatttggaaaaagggtctttgcaatgtgataaagttaagcatcttgaggtggggaaattcttctggatgatctggatgggccctaaatgtgatcacatgtgtattcttagagaggcatagagagaaattacaggcacagagaagaaggtgatgtggccacaagccaagtcatgcctgccaccactggaaggtggaagaggcctggagtggattttcctctagagcctccagaaggaacatggccctgcagagcccctgattttggcctggtgatgtggatgttggactcttggcctccagaactgcaagagaatacatttctgttgtcttaactgggaagtttgcgtatactttgttccagcagccacaggaaactgaggatacctattgctaagattactattgatgtcatcctgctagcagaaggtaggccagagctagattaagtcctgtgatctgaactggggcagtgtgagctttagcatactccacttagtggtggagaagcctacttaagccaacaggcattcatctggcaggcaccccacaccttttccccacaccacttacttttttgtttcctcctgcatagggctaaacagtccttgttgactgaaaaaaaaaaaaaggacagtcccagccacccaacaggcttctcgtagtatgcacaccactgtcattgggaacatgactgtagggaaatgaacactgttttagatacatttatgctattttgtggagtgtcgtttttccttggtttcaatatttgttttgtggccttaaaaatctctacatcggtgcagatttacccagcccattttcacacccactgcaatcttcttttccctctatgctttccatgtgctgtttgtcctagaattggtaactgcagcagagagagagagaacccacaaagcaccatttcctctttggtggcatggttgctgggtactcactggctacgtggtcactgggtacatcatggtcttcattgattcagtccctggcctgttggttcttaggcagatgtcagcacattccagctgtagtgactggagcaccccagtgtactaagaggtttattggttttagaattgcatccctgaagctactacactcacaccttttttttttttttttttttctttgagacagagtcttgctctgtcacccaggctggagtgcagtggcgcaatctgggctcactgcaagctctgccgcccgggttcacgccattctcctgcctcagcctcccgagtagctgtgactacaggcgtccgccaccacacccggctaatttttttgtatttttagtggagatggggtttcaccgtgttagccaggatggtctcaatctcctgacctcgtgatccacccgccttggcctcccagagtgctgggattacaggttgagccaccgtgcccggcctacactcacacctttaaatcaggtgcagcacctttaaaccccttcactaagttcaaggcaccaaagcacagacatagctgtgcaggctttgcctgccttcccaccactcctctaggcacacccagggctcaatacagcactgcaagatgtgtgttcacttttccctctgtgctctttggccacccatctttctagtggaagagtttcctttcctcctcgttctcctgagcaacgttttcctccatcccctcctagctgaggctgacttcaccacctcttctctgggactttgtcttgctcaagtcatttcaatacatcagcaagcgaaagtggagttttgtacagtcagaagcttgcccgagctcagctactcattagctttgtgtggtggacaggttatttcacctctctctgcctgaaggccctatctgcaaatgggcttgataatagcatctttttacatgaaattaatttatggatctaaagtcctttgagagaacattctggatatctaataattatcaaaataatgaattctctgggttcgaagtcattttttattcctcaaagacaaggctcatgggttgtggaagcgtccttcactccgtggcctggtgttgaatgacatgaagttcttttgaccacagacactaaatctcgcctgtttccagcacttacctgcccttccaccaacatttttgcattcacatttcttttgctgtgggtaacttcaaacaaagaagagtttgtttgtttgttttttctgcagtgtcagagaacatttttgctcatgcctggtgtggagtaggattcgagaattttgtttactctcgcttttgctgtcaggcaggggtggaggtgggaggtgtcacggggtcagcacagactgaacaatcctgacttttgcagtaattctgttttgagcctttgtccttgtttttggcttttaagtagaagccaggagcaggggtgctcttagagggggggagaaaaagtaataaaaacagagaattatttcctaaagcaaaacagatcatttggagggccatgttgtccttaaatatggagacacttgacttttatgcattactaaacagtgtctctgtatagacatgaaccctttgatgggcagagtcactgtgggtcagtgctgacaagtctggtcctcaggcaacagggatacagctgtgtcctcaacaaagcttttggtgtatgtgcccgtggatgaatccttcagaacctctgcatgaccttactttgacccattgcccagctagagcaccctcagagtgaaattaaaaatccacattgggggtgggggaggtgggaaaggggcacacgctgggtaggttcagcagtgttgccaccgatctagcttttatgcaaggcagtgagtcacaggtgtttatcattccaccccaccatttatgctacatatattctctggattaagaaaccacctggagggactgggtgcagtggctcaggcctgtaatccgagcactttgggaggccaaggtgggtggatcacttgaggtcgggggtttgagaccagcctggccaacgtggtgaaaccccgtctctactaaaaatactaaaattagccaggtgtgatggtgggtgcttgtagttccagctactcaggaggctgacgcaggagactcacttgaacccgggaggcggaagttgcagtgagccaagattgcgccactgcactccagcctgggtgacagagggagactccatctcaaaaaacagaaggaaagcatctggaccgttctctgaacggattgcattgatctgttggatcagtggatccaatggatcaaggattgcattgagttatttttttttaattgcaaattactttggaacacctagttgctgactgtttcactgtagcctaatggggtctgttaccctgaggaaacagccctgcttctggggtcagagagaactgaatgaaagtgggagtagtggtggtgacggcgaagatgataaagatagcaaatgcttctttaacactaccattagtaataatagcaagtatataagacttactttgtcctgggttctcttctaatgctttgcgtatatcaattcacttagttccacagcaaccctatgggttcggcactgttattttccctgttttacagatgaataaactgcgaagttgggtaatttatccaaagccatacagctaataagtggcagggcagagatttggccctagctgcccacgctcttggtccctaagtgatgctgcccctgagaagtcacccaccacctgcagcacccattcacgtgagatggcctgactttcccctgtgcaccatcagatgtgtatccctcactcgggtgcctgcaagcctttgtgagcgcaccttgcttctctcagggaaagcatagcggtcactcccgcctggcttcctgtctgggtccacatctccacttttcatcaagcaggctcttggcaaaatcactggcttcattgcctagcctgcactgtgccatctactgtggtgcacctgtggcttagattctccaatccggctagggcggcccagtcctgcgagctgaggagcagcccatctgcctgtatccccactccattcctgaacatttacttacaactctaaaactctcatgtcctgggttcccgagccacctgcatcggggatcactgggtaggtggttctccatcttcatcatcttatttgaatgggctttatccagaaatgacaggttacatgatcaggaaattatataaccttctaacccaggctggtttttctcagtgccgggcttgacagctgataatttcagagcagccatctgaagccaaaaaaatgagaatataattagtattctgtatttctattaaagttctggaattacagaacagactttctattctgaaatggccagtgccgtggcacagatgtatttcctcagcagatgtctcctcctcataaaggctgcagaactgctaatgagctgcaatagaaaagcattcttcccgcgttccctgccagggccttgggcccatttgggcagacctcggggagcagtcactgcttctgcagctgaaggagcaagggaagtgtgttgtttctatactgttgtgtttagagactacctgtcttttgaaagttgagttggcatgatagatcttttaaaaaaaaactcattttcaatagtgtgtgtatctaagtagtgtgattttgttgttgttgttgttgttgtttccttatcttaattctgtgggtcaaaacaatttggttcttgcagaaagtgaaagacaagaaatgagccgtgggacctgtgctgggtctgttcttcttggacccagtattgctcttaggctgtggaacttgctcttgcttagtaactcggaattggcattccctccaactgtgcttcccaaatgtgggatgggaccactgatgggtgtgacttttggttgcacttgaggtgatttctgaaggtactgtacggatgttaaaaagcattaaattacgtgatgagttagttattctcaattttctttcaatctcagttgaagcagcaaagacttctggggctggaatatccttaacacactagcgcttgttaatttcccctttgtagctaagagacagaagatctcaggcaactggatccagctagaaatgaataacatctattttcattgtgtttacttttatggttaccttccatttatggcaaacaatcttggttttctgtttcctatagtgatgtgtttcctttttaaatgatggatattaaaaagcgagccaatttaaagaaaaatgtgaataatagttgaagtcttcaaatgatgtcagtgtgctaggccagggagcacacttagagagcaaatgctgggtgcagtgaacagtgcctggacctggcttcacctgagactcacctggggagcttaaagatcctggtgcctgggtgtcaacccggaccaagtagatctgactctctgaaggtggggcccagggatcagtgtttgactaaaacatcccaggtgtttccagggtgtagctgaggttgagaatgtctgcccacctatcctggggcagcgtcctcaccctctgactccatatctttttttgggggggtcggggggatagagtctcactgtgtcacccaggctggagtgcagtggcatgatctcagctcactgcagcctccgcctcctgggttcaagcgattctcgtgcctcagtctcctgagtatctgggattacaggtgcccaccagcacgcccggcttctttttgtatttttagtagaaatggggtttcaccatgttggccagactggtctcaaactcccaacatcatgtgatccacctgcctcagcctcccaaagtgttgggatttgactccacatcttgatcacatctttcccttgtttctctcttctgtctctagcccttgttctcatccgcttccccacttcaattttcctcttattttctctttcctagcttccccagcttcccctcttccatcttccttacaactattcctatgagtaatgccccctagcattgcctcttagcctgacattcttgaaaccatacagttgaaaccctgttagaacattaccacactgtactgttttccccggcatttgcttaccactccgtaagctgttggtgcagtttctgcacatctaagattgttctccaccagtaacttgtattaagagcaattatgatcatcactattgtgctctcaccgagtgcctatcactgctctaagcactttacatggatgagcctacataatccttgcttgaaggagatataattttccagatgaggaaacttaggaagataaaatagcttgtccacaaccacagagtggcagagccagaattcaaatgcaggcagccttgccccagatcctacactctgagcagatgggaccctaagttagttgctcgtaatcctgattcaggtgtcctggcatgccatgagtcacactcacacaggctgttctctgctgtgataagaaattgaaatttggacccactatttgcttcaatgacatttagaattgataactctttttattttcaacttaaatggtagtatctcagtaggacactcacagctttaaatcccatcaagattttaactcatcaccattccgaagagatcttacttaaatgattttttttgtgtgtgttgtctgtcaggaatataaattgaagatataaaagccagcacccgcaataattctgcaactggtaggaggcaacccaggacctcttggtgaccttaataagggtcttctttggcttatccaggatgtgaccttctgcagcctccagtattagacattccagggcattttctgccttttaaaaagcatctgattctcattctggtgtttaatcagagagagaccgttggcctctttccattcctcatgggagagctccatttttgtgctcacatttttcatctttggtgatactcagggttgatgttttagtgggctagactttctgcattggattaaaacctttcacatgagcttggtgaattctccagtgaccaagtcccctgggggcctccaaccctatagattccagcatgataagagtggaaaggagtccggaacatcatgcctggggtatagtgagcactcacaccatggatttattttttcattttccaagcccccaaccatgtaaggtattttataaacattattttatttgattctcccaacaattctataccactggaattatgtccgtcttcatttttctagatgaagagacagaggctcagagactaagcttcccagtgctcagggttacatggtgaaggaggcagagtttgcatgtacacctgctgagccacagggaccatgcctatgtgttttatttgtgtgctatctgctccctgagatgaatgaggttagatattttcttaggagaagaaatacttggaaggcacaaatggggtatgacaaactatgttcagcttctctgtggctagcagacctgagctagccccctccccctctgtatttgaatatagtcccatctgttacctacctatgtaaggcttccaggtaaggaggatgtaaggctgttggctggcaggaggcagaacacagtagatccacagactagtaaaggcaatgcctgtctctgacttccgatcttagggctgtacctccctcatttgtgtccaaagacccaacatctttagggttctccccctgcctcctccccatctaaccctgcccactgacaactccagtgccttcttctcaagttcttctgtaattcttaatttaataatcaaactatgctgataaactatgctaattgcctagatctgtggttctgcaacttttatggacatcagaatcacctggaggcttggtaaacacagatcattggacctcaccccagagttctgattcaggaggtgttgccagtgccgccggtccagggaccacactgtgggaaccactgaatcagggagcctggtcccagttatatgtgtgttgatggtgtctgaccagttgggtatctgataattcagccttactgggaaagatgccatgggaagataggaaggcatttgagataggagactcaggcttttgtcccttcatcatagcagtagataattatcttttacgttgacgtgcagtggctttagacagcttctcatggttgtgagcctctgccagctcttaaatctttgagcctgttttcctctgtggatgaaatggcctttccttctaattatttttgattcccatatcaggtttctcaagctaagattgcattggaagcacctggaggtcttgttaaagtgaggattctgagttattaagtctgaggtgggacccaaggttctgcatgtctaatgagctcccaggtgatatagatgctgccggtccatggaccagcaattctgagttacaactgtatacagcagtggtgcttgcccctgctgcccagtagaatcacccaaggagcttttaaaaacgaatacttgagccacattccttggagattctagtttaattctggggattagaatttttaactcccccattccccaacccccatgtgattccaatgtacagtcagagttggaagccattggcctttacccacaaaaagggataacaccttctgggagctcaggtgcgtgtgtggcaccatagaccaggttgggctggtcgcttccatgcagggagggtgcaccattactcctggggagctgcaaaggtcacctgggaatcttgttaaattacagattctgctttggcaggtttggggtgggacctgggtttctgcatttctaatagatatcttagtgttgctgatgctgccagtccaggctggtgctaagtcccaagacccacccacaagggcccacacgatgcccattatctctgccggtggtggcagcgggtagcttttctcatgtcgagtgttagaggcttttggcttccaccatctgtctccttaaacgccattctgacgtctcttttattcagcttggtattgacacaagacagcgggcaatataggtctgttctctttttgtaatattttcttccttctctcttcacagtacgagatgcaaaaaatctaatccctatggatccaaacgggctttcagatccttatgtgaagctgaaacttattcctgatcccaagaatgaaagcaagcaaaaaaccaaaaccatccgctccacactaaatccgcagtggaatgagtcctttacattgtaagtggtctctccttgatcaaatttcattcctatacaccatgcagttgcccacctcattatttgaggtaatgaagtaggttcattataaacgtctttaaacatgtcttcagtcctaagacctcctcaggctgccattagggaggtagctattagcacctgttcgatagatagtaatttgatttatcaagagttgcataattcaggcctcagattattattatctaatctggataaacaattctatttaaggaaatagaattaaggtaaatagaatttaagctaaaaatgtgtcaggtgtgtccacctcttgatggacttaggttcttttgggagttaggggagggcataaggcaagaatttaaataatttttagaccacagaatgagtgagtaacatagaaagtgttattgccactgaaatgggaagatcattcttgccttcaaagagagaagacttcctggaaaaggtgacatttaaagccagcctgggagggttgccaggatttcagaggtagagaaggggaagaaggaaggagggaataaataaatcaggaggactgagtgtagctgagggaaagcaagagttcccctttgtagagtagtatacaggaagcagtttttctgtggacaaccagaaaggtagctgtctgttctagagggaccagcaagctctgctctataaaggatcagatagtatatattttaggccttgtgggtcatatagcctctgttgcaccggtataactttctagtgccaaaggagccataggcaatatgtaaacagatagccatggctgggtcctaataaaactttatttataaaaatagacagtgggatagatttggcccatgggtcatagtttgttaactcctgtagcgctttgcttgccagcataaggggttggtattttactggaccaggaagacaaatatactatttctttatctcaggctcgagtcatatacatgtggtatctcccaagaaaccatgatcaagataacctagtgtttgcatgtgtgtgtgtcttgtagcaaattgaaaccttcagacaaagaccgacgactgtctgtagaaatctgggactgggatcgaacaacaaggaatgacttcatgggatccctttcctttggagtttcggagctgatgaagatgccggccagtggatggtatggaagccgcttaggttgagtatgtctcaaagcatcagaccatttagacagttaggtttcagtctctcaaatgtcagttgaggctggacatggtgcctcatgcttgtaatcccagcacttcaagaggccgaggcaggtggattgcttgagctctgaggtttgagaccagcctgggcaacatggagaaaccccacctctacagaaaatacaaaaattagccaggtgtggtggtgtacccctgtagtcccagctacccaggaggccgaggcatgaggatcacttgagcccaggaggctgaggctgcagtgagctttgattccgccaccgtcccccagcctgcacaacagagctaccctgtctcaaaaatataaaaatgtaaaaaaagtcaaatgtctactgatctggctgtagcctctccgtaggatgcgtttcacaaaaccgctcgactagaggctgcaggaaaggcttgttaaacttgcggtggtaactcttcttctcccgtccttgaaaggtacaagttgcttaaccaagaagaaggtgagtactacaacgtacccattccggaaggggacgaggaaggaaacatggaactcaggcagaaattcgaggtgaggataacaaaatgcccggaaacacctttcctttagaaagcccaacttcaggaacggccgagatgttgtggtcacatttttgaaaagcaaaaaaaaagtaatctcaatgttaatgatctttttctttatttaaaaacatgaatgttgttcgttccctttcctttgcaagctgttgactttttatgactcttaccacttagaaaatggaaactggaaatatcgcagaactgagagcatggttgatttctgcataagagatctgtttgcacatcactggggagagaagcaggctctgagggcaggattgttcttacaaaggaggacttgtgctcttctgaaaaggaggaagtcattttggcctttccttgggagctcatttgtgtgtaatcaggctatcatctgagactttttttttctacagaaagtacaaggttcctaattttgttctgaaagagcagcttaaacaaatatgcctttgtgtgtgatccctttttatttatgctccagatgtttagcaaaggccacctccttctcttcttcctcttggtatttgtgtttgcctctgtcccggattcactggtctttttacttctcctcctctgctccttactcctctttttcttctcctctctctcccttctcctcttcatttaccgacatctcagcttttagtaaacggttcttttctgtaagcaccttccttatgttttaaaggcacaacttctaatatttgtctgtttctctaatcacccttcattttggctgttcgagggactcctagagtagccttttcagtctgtgtaactggttaattccttcgtgaatctttctcttcttcagacttgttagaattccctggaatttccccgctctagagcagtacacgtgcacacgcacacatgtgtgtagatgctgaactgctactgaaatgttgacactaatgggatgctgatgctcctcttttccttcttctgttgttctccaagaaacatacagatctggggggtggggaagagtggtcttggggggataataaacctccttcatgccccccacaaaagaaacatataggtcttatccagagagaatgaatcccaaaggatgtaaaacatgcagttgttcaaattactttgttaaactgatgtttggttaaagttgatgtttgtggcaaatactaaatggcaggggctctttggttagatgtccttgggagcacagacgagtgaaatgattcacagataataaatggcaatgaacggcaggcctcgggattgaagcaggagggagtggtggagactggggtgagctggtaagcttcagctctgtctgcaggtggcagctacggctaccctgccccactcgatgtttctcacaggcgagtccaggccctctattgccggatcttccttcttccagagaagccagaaatccaggtttttatatgatacattctgatttatcttaatgttggcagagttctaatgttaaaacttagaaccaggccctgtgcagtggctcacttctgtaatcccagtactttgggaggatgaggcaggcagatcacttgaggtcaggagttcaagactggccaacatggcgaaacccaatctctactaaaaatacaaaaattagccgggtttggtggcatgtgcctgtactcccagctactccagaggctgagacacgagaatcacttatacctgggaggcggaagttgcagtgagccgagtttgtgccactgcactccagcctgggcaacagagcaagactctgtctcaaaaaaaaaaaaaaaaaaaaaaaaatttagagctgtccggatgtggtagctcacacctgtggtctcagcactttaagaggccaaggcaggcaggttgcttaagctcacaagtttgaaatcagcctgggcaacatggcgaaacccagcctctacaaaaaatagcagggtgtggtggcatgcacccataatcctagctacgagaatcacttgaacctgggcacgagaatcacttgaacctgggaggcagaggttacagtgagccaagatcacgccagtgcactccagcctgggcaacaaagtgagaccctgactcaagaaaacaaacaaaaaacttagaactctgtgtaggtcaaatatgcatctattgctttagacaccagtaggattcaaccagtaagaaccagcttgcagtctctgctcttcaaaaatagagaaaaaataattttaaaaaattatttgtatagttatatatattacaatatgtataaataaaaaggtgcatgtatctgtgtaactactatttgtctatctatcaatagagagaaaagaatgagattcttttcaaagatgctttataatatttagaggaattcaagtacaaagatgaaagtcagggtttggggcaggttcaaatgtctatgccaggcatagctccttttcaatttgtatttcttcccttgcttcattatctgtttccacccctaccctgcagctgaggatgcagacctggggtactggacaggaccaccttcttgagccccatccctgatgtcacaccacctctgtgacggatggatccttctagagagagtttcaggactgagtgccagcattcttcagctgtctcaggcaggggaggaacctgaggagccagaaagaaccttccttaccgaatgttatgccatggtgttgatcacgagcagtcactgggtcaggggctgttgacgcagaaagagtgcattcgagggaggaacagcacgggcgttccccacagggttcctcacagtaatgtctgagacttagctttgctgctggagaaatattgacccactctttgtgcttcattgtcgtggcttcctggtgagtaaacttcctgtttttctgggcaatgagttcagctttttataaaggtcagagttctaaacaaacaaacaaaatacaggccagaggacctgagcaaaacgaagcatttctcttgggaggctggtcagaggccgcagggctgttgctgcttactattcctcctcctgggagggctgtggacttggcaggagcgccagcccaaggctgtgagcatcctggggagaggtggcatcagcagagttgcatggggtggaggctctgctcttcagcctagtgaggtctgtgtttggagcatctacatgaactgcattctaacctttgctttaaatacctttcagcttatagttcctagattttactcaaattacattagctcatttgcttagagcattttaaaaaaacacaactgcaagagactgggcagaaagccactagaggatggcgtcaaaaagatgctgagaattttacgacagctgccatgcttcattttaaatacatattcagatctgattttaggcaggggttcaatcacgtaatggtgttttgttgaggtctataaatgtgagagttgcaagacttccccagtgccaagttactgggaagggatgcaccagggcagaaaggctggcatccacatttgagcagttctgggtagcagccaggctttgcaaacagggtgccatcagttggcatcaggtccaatttgaggcacctctttgagcccccaccccgtttcctccttttcggtctgtagcatgagtgcttcccagtgtctccaggctcccctctctgggccctttctcgccaactaactgccattctaacttgctttccatcacattagtcttttcttccctacccactctttcatagatactttgccaccctccagtaacagtttgattcagctgagtaagatttttttgttaagttcaatgatgaatctgtattggttgaaacacacacgagggttcgtcctgttgggaacaggcatcactcagtgggatcacacagtgtccagtctgtccttatccttccatgtccagccctgttttctaaaaagggttccctccatgcagttttcgaatccttctccaaaaatcaaaagtcattcagttggatgaaagggaaaccaaacgagcatttacaactctgccactgcattagtattcattcgataattaggtggaaagtttttgcaatttaaatggttggttctcaaatcttggcaaacagaatgatcagtgactggagctcttaggagccaaggaatattccagggtggctggagatgaccttcctcgctggtagagatcctgctagagcagttcatcctcctacaagacaaaacaaaccagaaccttgattgcgatactcatggacagtgtgtctgtgggcctttaatctgttccacgtttgtcatcaagtaaagtacacgtggtccctgattcacaaacataaataatgcatttttccatttgttaaaaaaagtaaggtgccagcagtgggctaagcagacagttcctgctttctttggagcttacgttctgtatctatgggccctgctgcaaaaatatttgggaacaaagcagggagcttatcatatcccctgtgctggccagtgattcccctgaatctccaggcactattgaggacaactgagattcctgtttttccctctcactgcttggtctctgctccctgtgatgaggctcacggccagagttgggaaaaggtccaccttgcgttagaggcagtgcagaggatgggttagctctgctcagcaaactttttctgtacctagtcagataataaatattttaggctttatgggccatgcggtgtctggtataacattcaagtctgccgttgcagctcaaaagcagccacaaatacataaacaaatgagtgttggtgtattccaataacacgttacttacaaaaacaggtggcagaccagaattggcccaagggccagtttgccaacttctggtttagcccgtaggctctagaatcaaatcctagtttagtcacttatttactatgtgacctttctgtgcattggcatgcttaactataaatggaaaaaataggtcaggataactagttctgtttttctattagttataaatagaactaatatcctgatacgataggatattagttgttgtcagggaagtaaatataataccacagtgagaagtcagcttgcactgatccttctcgattcaatggtttgatgttgggtcccgattacaaactgaaaagtaggcacatataaaagatgatttggccaggcgcggtggctcacgcctgtaatcctagcactttgggaggccagggtgctggatcacgaggtcaagagttcaagacaagcctggccaagatggtgaaaccctgtctctaccaaaaatacaaaaaattagccgggcatagtggcgggcgcctgtaatcccagctactcgggagactgaggcagagaattgccggaacccaggaggtggaggttgcagtgagctgagatcgtgccactgcactccagcttgggcgacagagcgagactctgtctcaaaaaaaaaaaaaaaaaaaaaaaaaaaggatttgatgtaaaccacacgaagaatcaacacaagtataatcataatgattgttgcagctaataattcattagagaagtgattatgttaacaacagaaacgtcacagttgattgactactgattgcattcacatgaaggtccagtacttttgttggtgtaatattgccctctgatcttttacaaaatctgggatctgaatcattcacatcttgagctgtacccaggaagttacatgctacattcacatttccaatggttaaaaaaaaaaaaaaaaaaaaaaaaggtatcttctagccacatctttccctcttttaagacagttcccgaagttcttattgtcatttgcatttcatttccatggcttttagtaagcttagtatttttgtttcttgtttatccgtcagttgattctttccctgagcctacttgggctacatctaccttcagagccttggagttgtcctagaatcaagaaaatgggctgagaggtaggggaaggggaaaggtgaggggaagggagttctgggaccagtttctaggcctgcctgggatccagccatttcctatccccagagttacattccttcctttcctcagcgccccttcctcttgtgcagagcctttctcctaagcttggcccctcttccctagggctgtttactctgtccaagaccttcttccccaatcctgcaacctcaagagaaatcaagccagaagggcaaataaccccagccatggacctggctccctggggctgagggcacttcaggacaagtggtgaagaccacgtctcccttctccaagcttcagatttcacaaaacgaaacatacgtttgctcattttgctccagtatcacaatgactacttttaatttgcattttgatggcttttagctgggaatggactttcaacgaactcatttctacctgtagggttgcttatctactccatgtgctgttaacagttaatggagattctaatattaaaaagtcaagcagctttccttaaatgagcctacaccattcaattttgctcaattgtccaggctttttattgtttttgtcatttattatttcgttcatcatttaaaaaacagagcaaattaagaagctaaaagcgccttggccttttcctcctcttactgtaaccgtaacttttgctgcacaccattgctctattccagagcaagttaaacatctaatatttaaaaagccaaaaagaaacttgtagcagaacaaagatagctaagaggcagcacacctggggctttgtctgcgatgggatatttctgttgtcagaatgtaatgaaaaatgatgtcccattagaaagctgatggataatatatcacatattactcatttgagtatcaggacccaagaaaacaagatgaatttatttaaattgcaatgtcccttgaagcttgtatgagctctctaaagggaaatacttttaaagttcttataaagagagaaatttatagccaagtgtgaaaaatgaagtgcagttttgaggaccagttcccatcctgtcccttcctggggagcaagaggtgtgatgttgatggagcagtgatgaaagcagggggaatcatggcaaacacccgctgtgtgatgattagatgctaggcagtttccgtgctgggcatcgtatattcctttcatttgagaagtggtattgcatagtggttagaagcctcagtgttggacccagacttctaggttcaaatcctgccccttttatatcccagttgtatgacctgggacagattactcaatgtttgagcatggtatttttctagaaggaatatgcaatttaaaatagccatagtttcatatccctgctctaccacttcccagctgatgatcttggataagttccttaaactctctgacctttgttttccttgtttacgaagtggagatgataatagagactgccgcataggactgctgggaggattcactcagttcacttacgtaagttgcttagactagtacctggcatagagtaagtgcccaataaatgtttgctaattatatgaaatagacatgatttgcccaagtttggttttgatttatatttatgaaaagttatttatctgtgcaaatgaggtgctaccaagaggtaagagcattcttagaactctgttttgagcattagaaattgttatcaaggacttatttctgagaacagaccagtggattggttgttccaacatttatggtttcttagaacctgaagctaaacccgaattctgctatcttgatgacattttcagcagacaggcttcccagttcatctctgttttcacccactttctcctgacacctggcacccaggaggctggggaaagttgtttgaacttgagtgcatacgtgatcgagagctttggcatctgagagacctgccttttgtccctgctcccaggttgctaatgccaccttggcctgactccgccgtaagcatctgtgctctgccttagaacctcaagtcaaccccctcataattaatctgattttccccagtcatagaccatcgtcatcacacctcgcctgtctcctcagagagtcgagaaagccttggaaattcttcgacccattagacaagtcagcccagaggaacccagtctgtctacctcttgtgatttgaagcacattgtcagctaaataatcacataatcataaattctaaaaagtaaatagctacattttgccttatcttgaaaatcctctagagccacactatcccaatagaatctaaagctagatgtcagcacagtggtggaataggagctttcaccatcattcccctgtagacgcatcaatgttgacaactacctatggacaagagtgtctttgtaggagtctaggaggccagcagagaagtttcagaacactgttggaggaaaaacatccacaaataaacacattgaagagggtaggaagaactagttttactttatctgtattacccctccctcaaagcagcactgctcagagccaagagagactctctcacctgtaattccttctaagggggaaagcaagagcatagtaagtaagcacccagctcccccagccatccacaacactgcccaagagccccacttctttctcacctcacccagattgctgagataatcagcatggctgagagattgggagaggctgagagcaggaaagagaagctgctggccctctgaagtgttctacagactccatcaggaagcccatccacgagctgcttgagacacctcatctactgttcccaaactctacaccccccacccccagactgagtccctaaatgtgcccccatggacagtgaatgcaagcgtattatgtagacagccagctcaactctgtgggattgggagaaggtacacaaacttgagtatttcaggacaccatcctagggaaaacaaacaggaggctcttagcacctaacctagctttgcaggattgaaagaaggcatgcaaagtcaagaattagccctcaagagggaaaaagaaatgtagagcaggtgcatccatagaaaaggattaagaaagtctcattatccatagacaggctgactggtgaaggcatttctctcctgatgccagtcaataaggattggaggaggagatgactgcctccttcttcaaatgtgaagacagcatttgaagcaacaagacttcaaaggacagcacttcaaggaacatgaaaagttaaggagccatgacatcacaaaggaacacaatattccagaaagcaactactaaaaaatggagatctaaaaatgacctgacaatttaattgttttaaggaagctcagagagctagctacaagaggatacagacaacaaaatcagaaaaacaagagctcaataaaaagattataaatcatttttaaaaagaaccaaacagaaattttggaggtgaagaatacagtgaatgaaatggaaaattcaatagagagtgacaacagcagatttgatcaagtagaagaaagaatccatgaacttaaagacagctcatttataattaccaagtcagaagaaaacagaaacaaatgaaaaggaatgaagaaagcctatgggatttatgggacaacattaaaagggctaacatttgcattgtggaaattctagaagggaaaaagagaaaggggaagaaagcttatataaagaaatgatggcccaggtgtggtggttcatgcttctaatcccagcactttggggagactgaggcaggtggatcacttgaggccaggaattcgagaccagcctggccaacgtagcaaaaccctgtgtctactaaaaatacaaaaaaaaaaaaaaaaataggtgtagtggtgcatgcctgtagtgccagtactcgggaggctgaggcacaggaatcacttgaacctgggaggcagagattgcagtgagctgagattttgccactgcactccagcctgggtgacagagcgagactgtcttaaaaaaaagaaaaaaaaaatgtctgcaaacttcccaagtttggagaaagatatggacagtagaaaaggtaagcaagccaggcacagtagcatgtgcctgtagtcccagctacttagagggctgaggcaggaggatggcttgagctcaggaatttgaggctgtggagcagcttcgattgtgcgtgtgaatagccagtgcactgcagcctgggcaacataactagactgtctctcaaaaaaaaaaaaaaaaaaaagattaacaaaactaagagttgatttttttgaaaacataaacaaaattggtaaacctttagctagactaagaaaaaagagagaagaccaatgaataaaatcagaaatgaaggagacattgcaactgatactacagaaatacataagatcataggagactactctgaactgttacacaccaacaaattggataacccagaagatatgaataaatttctagaaacatacaacctaccaagactgaatcataaagaaatagaaaatctgagtaggccaataatgagtaaggaggtggaaccagttatcaaagatctcccaggaaagaaaagcccaatgcctactggcttcactggtgaatgctaccaaacactttttaagagacaaggtctcgctctgttgcccaggctagagtgctgtagcacaatcatagctcactgcagctcaaactcctgggctcaagcaatcctcctgcctcagcctcctgaataggtgggactacaggcatgcaccaccacacccagctaatttgtagggatgaggtcttgatgtgttgcccaggctggtctcaaactcctggcctcaactgaattcctagcctcaaggcttgtcctccctttgctgggccactgtgcccagactctaccaaacatttaaataagaattaataccaatccttctcaaactcttccaaaacactgaaagggaaagaacatgcctgagttcattttatggggccagcatggccctgataccaaatccaggcaaggacatgacaagaaaataaaattaaaggccaatatatccaatgaacagagatgcaaaaattctcaacaaaatactatcaaaccaaattcaccatcacatttaaaggatgatatgctgtgatcaggtgggatttattcctgtgatacaaggatggtttaacataaaccaatcaatgtgatacacaacattaacagaacgaaggataaaaattgtatgattattttaatagatgcagaaaaaggatttgacaaaatttaatgccctttcaaaataaaaactctcaacaaattaggtataaaggaatgtacctcaacacagtaatagccatttatgacaagcccacagctaacatcctgctctatggtaaaaagctataagttctttctttcagatcatgaacaaaatgaggatgcccattctctccacttctattcaacatagtcctggaagttctaccaatgcacctaggcaagaaaaagaaaaggcatccaaatcagaaaggaagaagtaaaatagtctctgcagatgacatgatcatatatatatatagaagaccttaaagacaccaccaaagaacttgttagaactaatgaacaaattcagaaagttgcaggatacaaaatcaaaatacaaaaatcagttgtgtttctctatgctaacaatgaactattcaaaacaatataagaaaacaattgtgtttacagtagcatcaaaaagaacgaaatacttaagaataaatttaaccgaggaggtgaaatatctgtacactgaaaaatagaaaacactgatgaaagaaataataatacctaaataaatgggaagatatcgcctgttcctggattggaagaattaatattgtcaaaatgtttgtactacccaaagtgatctacagattatacgtaatccttatcaaaatgccaattattagtataatttgtttccatagaggaaaaaataatcccagaattcgtatgaagccacaaaagaccctgaatagctaaagtaatatggagcaagaaggacggaggtatcacactttctgatccaaattatattacacatctataataatcaacacagtatggtactggcatacaaactgacatacaaaccagtagaacagaatagaaaacccagaaataaaccccacacatacgtggtcaactatctttgacaaaggcatcaaggatacagaataaagcaaggatagtctcttgaataaaaggtgttgggaaaactggatatccacataccaaaaaatgaaattggatagatgcatttcgtagcatatacaaatgtcaactcaaaatggactgaagacttaaatatgtaaaacctgaaaccatagaactagaagaaaacatacttggggggaaagcttcatgacattggtcttgacaatggttttttggatatgacaccaaaagcactggcaacaaaagcaaaaataaagaagtggtactacatcaaactaaaaagtttctgcacagcaaaggaaacaaagcaacaaaattaaaaggcaacctgtggaataggagaaaatatttgcaaactgtatatccaataagggtttaatatccaaaatgcataaggaactcatataatacaactcaaaggcaaaaataaaaaagaaaacccacagattttaaaatgggcaaaagacctgaatagacatttttcaaaataagacatacaaatggccaacaggtaaaggaaaaggtgcttaatgttgcttatcagggaaatttaagtcaaaattgtcaaaattataatgaggtatccctgcagacctgttagaatggcagttatcaaaaagtcaaaagataagtgttattgaggatgtggagaaaatgatatacactgttggtgggaatgtaaattggcatatcagttatggagagacagtatggatgtctcttaaatacttgaaaataaagctaccatacgatccagcagtcctgattctgggtatatatccaaaggaaataaaaatcactgtcccagaagagatatctgtactctcaagttccttgcagcattattcacaatagccaagatatggaaacagtgtgttcattaatagatgaatgcataaagaaaatgtctgtcacatacatatctcatttatgtgtgtgcatattcatatatatatatatacacacacacatatatacatgtaaaggctcaattgtgtatacacatatatgtatatgtgtgtatgtgtgtgtatatgtatatataattgagtctttaaaaagaagaaacatttgtaacgcatggatgaacctggaggacattatcatattatcatctaagtgaaataaaccagacacagaaacacaaatagtgcatgttttcacttatatgtggaatcttaagaaagtcaaactcacagaaacagaatagaagtgtggttaccatgggttgagcagggtgttggaggaatgaggagatgttggttaaatacaaactttcagctttaagatgagtaagttctggagagctaatgtacagcatggtgaccaataataataatgtgtttttatactagaaatttgctgagtagatcttaaagattctcaccacacacacacaatggtaactgtaaagtgacagatatgttaattagtttgattgtagtaatcatttcacagtggatatgtacacaaaacatcacattgtataccttaaacaatgactaataccattttgttagtcatgcctctatacagggatgccttctgaaaatgtatcactaagagatttcatcatgcaaacatcatagagtgtatttacacaagcatagatggtataacctattccacacttaggctatagggtgtaacctattgcttctatgctataaacctgtacagatgctgactgctgtaggcaactgtaacacaatgctaagtatttgtgtatctaaacatagaaaaggtacagtaaaaatacaatataaaagaaaaaaagtggtacactagtatagggcacttaccctgaatggaggttgcaggactggaagttactctgggtaagtgagtgagtggtgagggaatgtgccagaacaatactgtaagccaccacaacacttaggctacactcaatttatttttaaaatcttctttcttcagtaataaccttagcctacagtaactattttactttataaacttttaaaaaagttttgactcataataacacttaaataacacttaaaacacaaatacattgtatagctgtacaaaaatatttttatctccttattctatgtctatttaaaaatttaaaattttttttctgttaaaaaattttttttttgaccctacacaggtcaggatcatccatatggctgtccctcacctctgcatcttgtcccactggaaggtcttcaggggcagtaatacacatggagctgtcatcacccctgataacaatgccttctggaatacctcctgaaggctctgcctaaggctgttctacagttaacttttgttttaataagtagaaaaaaataagacctgatgtggtggctcatgcctataatcccagcaagtttgccaggccaaggcgggtggatcacctgaggttaggagttcaagaccagctgggccaacatagtgaaaccgcatctctactaaaaatacaaaaattagccaggcatggtggtgagagcttgtaatcccagctacttgggaggctgaggcagtagaatcacttgaacccaggaggtggaggttgcagtgagctgagatcgtgccattgcattccagcctgggtgacagaccgagactccatctcaagaaaaaaaaaaatagaaaaaatatactcttaagataacaataaaaatatagtatagtgaatacataaaccagttatatagtcatttattatcgactgtgatgtactatacataattgtgctgtatttttgtgtgactggcagtacagtacctttgtttacaccagcatcaccacaaacatgtaatgtgttgtgcagcaatgttagtgtctgtgatgtagacatcactgggtaataggaaattttcatctccatgataatcttatgggaccaccatcatttatgcagtccatcgttgaccaaaatgtcattgtgtagtgcctgactataaaacctttttctacatttataatctcagcaaagttaaaaaaaaaaaaaaaacaggaataggttaagttcagaactgggcttgaatttaaaatccccactattaacaccaccactattgatttggtttcacttaaacatcatcttctgtcccataaattagtgctgttatttggaaatgtgtctataacacttcgctcaattttaatttgtatctttattatagctttagagttgttagtgtactagtacatatattaaggcttatagttatctgtacatacatattctactaactctataataaaatttgttaacacatggagcaaaaaaataatctcaagctagcttaacaatggcttctgtccaaactagacccccagtaatattgggatgactgaagtctcatgcagagaaatatgtgtgtcttcacagttcttatatttgtgaccattcagaactatatgaagatataagccaaaagaaaattggtgatcttgaatgagctgttttgtgaggattataagtccagatactacaggaagtatcaccctggattcagattgcctgaaaaatcaaatgtgtatctgtttttacttattcaagagaaatattttgagattatccttcttactaattaacaaattaatatgatccaattaaactataattaaggtacttaaatcaacaaagatgagactctgttgctaggttatatgtggaaagagcaagcaagcatttttctcttttatcagaattagattttcccaaagcctccactgtctttgaagactttatctagttcagaatgctctcttccagttgggggaaaaataaaaccacaaaacacagttcactagagaccctcagataaattgtagctatttgttgatctgatcagccctgccacggttactatggaaaccagagtactttcagatgaccttttagacacaaaacaaaaaaatctatgtgccccaatatgctctctgcttttttgtccctaaatagcttacttaattacttccttaactgtgtgatgttaagggggaaaaaaatctataaaatgcacagcagttgaaagagatattttaaggcttatccttcagctttgtcttagaagcaaagtcttaaactgatataggagacaggttagtagtagaaatcattttcaaacactcattagatcactgccaacagaggttaacctggcattcagctgagcagacccaaaggaagcaagacagcctctgaaagcaactgtacagaatttctcatgagtctgtaagggagggtgcatgcatttatattagagtgctggcagcatgctttcagtttaatttgtctcgaggaaataattttgttgggaaaccaaaaaagattgtgcattctagttgtctgtctaatgaattcctgaaacagcataaaagccctgtgtcttgtagttacagggatggccttgtgggtggatgttgctggttgaagaaatattagttaatatcacacaagcctgttattaaatgttagaggcagctttgcaaatgtccccaggccctggtacccacaggggatgagcaggtaccaagggtgccacccttcatttacaggaactggaaggagggaagacagagccgatgtccactggcactagcatgaacatggcagctaaacattggcacaagtcttcatggctctatctcaagcacctaagaggaaattaaagccccctaaaataaaattaagggacctagaataagggtgacaccaaacataatgctatttgttgttttccccaaaaaacatgccctacagagaattaagattgcctgtccctggagcggtaaatcgcaagggttctgacctccctgggtatcctgaaagaggaagtggcgagcagcttgagctctagatcttgcacctccaagtatgggagctgattaataatgcagaggttcagagcccagcccagcctctgacccagtcagaatattattttaacaaggtccccaggtgattcctgagcccattaaagtttgagaaatgctggtcaagaagatgaaacctgttgactgatgagtaaacaaattcagtctcctgtggtcgtaaagacagcaaggatagacttcatcacccccagtacccatattaaatagcgaagggatcagtgaactgtgacccacacccaaccacctgcttttgtatatacagtctatgagctaagaatggtttcaaggctgggtgcggtggctcacgcctataatcccagcactttgggaggccgaggcaggcagatcgcaaggtcaggagatcgagaccatcctggctaacacggtgaaaccccgtctctactaaaaatacaaaaaaaaaaaaaattagccaggcatgatggcaggcacctgtagtcccagctggaggctgaggcaggagaatggcatgaacccgggaggcggagcttgcagtgagccgagatcacgccactgcactccagcctgggcgacagagtaaggctctgtctcaaaaaaaaaaaaaagagtggtttcaggatttttaagtggttgaaaaaaagaaggatatttgcgagacatgaaaatttggtgaaatccaaaatctggtgcctataaatagatttttattaacacaactacattcattcattcgtgtgttgtccacagctgttcctttgctaccacggcagagttgagtccctgcaaaagagactgcatgggcctcaaagcctaaatgtatgccctctggtcctttacataaaaagtttgtgacctctgggttaatggaataatagggtattcaaactgggagagatgtttaagattgtgtttgttgatggggaaacaaaagcaaaagggagtgtgttcaaagcttgttagtgcaggacccagacctcctgtgtgagttgatgcttctgtctcataccctgtcccttcccacacacccttccctatgacacccccttttctgactcctctccattcatccaccatgctcattaatgcatctcagcccatgcttgtgctccttggaaagaccctcccttctcctccacttccgtcagtcctaggcttttcaaatcctacaagtccctttatgtggttctctggcctcttaaaattgccttgacttatgcagtctaaagactactcacttgccagacacacctgtaagatgtgtcaccttcctgattccagagtaagaacctcaggccctcctctgaatactttgaagtctaaacatcaggcccatgaggagtccacccttcacctgcacttttttgacagcccagaggaaggtgtctgagccaacatctttatgaggctggttggaggccttcaggggagaggccattttagagccacgagaacctccctttcttcctctagcagttgtgtaaaactcacgtgtgtgacaaatctggttgctcttgaagatggaccagtttctttcccatacattttatggttccagaaatcagtaattctggacatttctaactggtggatgctgcatctactctgtgtcaagcactgtccctggggctagagacagaaccttgctcttgggaacattgtggagtagtactaagggatatgagaccttgtaccttatctccactttctggaaacgacccctgaccctcatagtggagggaagcttacaccctgtctcctaaacagtagctagcctagatcagcgggagtctgacccaggccacaagtcagttctttgtccacgtagcagtatctccagctcttgagatgctgagtaagcctcactgctgaaaagattatggctcgcctgatgtaacatggcttttataggcagctagaaccacagaggcctcagagaattcaaaatcacagctccctacatggggtccaggaacgtgtggccaaggtgctcatggtgttgtattttggttttagtttgttttcagggatgaggcctctttgcccattaggactgtcgccatgatgtacacatgatggtggcacttcccagttcatcaggccgaccaagtggggccatagatgtccttgttcaggaattcagggaactcggtggctgtcgtgtcttcagcacttaattgaaaacgaagtggttaacatttggcactagtgcagcttcctgccatttgccactttcaccttgagcagaggtgttttgcttcctcatctcccttcccagcatccaggtgtgtggtccgggaaggattccctgggacctcttgcagatgtgtagagcaagaggtgctgtgcgtatctgggctgggtcacttcagcctttcctttgatttttttttcccagagaagatttgggatggtttgtcatgtccaagtgtgaaacagccttagagttctttctaggtccatttgagtctaagaataactacccagtggctgccggaaggctgtgaagccacatagcaattgtatcaaggtgtctctgctaaatgttttttgtctccctgtagaaagaagcaggtgacctattgcagatggcagttggagataggaacctcctaaagtcatgccatatacttctcagggcatcccagctactcaatacagagtaccctatgcctatagatatccaagcaaagatcaggcaaccctctgagaaagatgtaggagaaatgcctgattaaatttcctctaaggctctgtccaataccaagattgcaataagggtgtttttgttgctattgttagttccctttaatcttgatgtggattaagatcgctatcctaaaatagagtttttggggttggaacaaaatggcctattttaggaacaatcataaatggatttgtgattactgacttttaaaggcccataatgataaattggaatagaagataacccatacctggtaaaagagatgcaaaactcatgatttgactagtttctcattttagtagacaaagccttactgagcacgtaggattggtttgcctctgatctcctctgttcaggttcagggctgtgatgacccattcaggctgtgggattttggttcagaaatctgatcatctgatccctctcaaattctctcctggaagccacctctcactgcttatgaagttgggggattacccctatgaatccttgtagagaagtctcaccttcatgaatccttgtagagaagtctcttttgagatgatttctttttttttttttttttttttttttttgagatagagtgttgcttttgttgcctaggctggaatgcagtaacacagtctcagctcactgcaacctccactcccgggttcaagcaattctcctgcctcagcctcccaagtagctgggactacaggcttgagccaccacacctggctaattttgtattttagtagagacaaggtttcaccatgctggccaggctggtcttgaattcctgacctcaagtgatccacccacctcagcctcccaaagtgctgggattacaggcatgagccaccatgcccggcctcttctgagatgattttaacttatttttctcacattagtacttgagaaaggaaagttatccagttaagataggtttttttttttccctttttctttttcggtggaagttgaaagtaaaaagaaaagcaaaccctggttgtgtggcattcagtcaactggagcttggttaactcactgcccaccagcttatgtttcgtcagtcatcttgggcacttccaagatattgaagagccttctgaatcatcaagaaaaaacaaaatcttgttactaatagttttcatggtaagcgggtttggtttcatcatcatttattgaaaaatggcaatctgtatataacattactgggcaccttgctatgtgctacctcaaacgagtcgattcgccaaatactccaggaccccgtcatgtgaactggccgatagcaaaacacatccctgaatgtagtggagctgtttgatgtgagaccactttcagacatggaaatgccacaaggaggagagaagggtcctgtcctcataaagcttgattctaggcctttcactattcaaacaaggaagagttacttcctacccctccaagggtcaaatgagacctgcacctggggtgcctccggagcagagtgcactggaaggttcaccgcaccttctctcctgaccctggtgctgtgtctcggggtcaccgtctgtctgctgtgcctgcctgcatcataattggaacctgtgctgtgttgtactcaatctcgttttctcacaccactaattgtgtgtagcacttcctgtgtgtaacatttctcctactaacctggcagtttttctcctcctcctgtcttttacagggctgtcatgtccgcttcttaaaggtagttcttcctctgctctttcctcatccactttccttccacaaaacacttgccttggtttttgtggctcccgggcctcagcctgcagccatgctctccacccttaaggatgcaccgcgtgttctggtagcttgaatctcacacctacttgtgtcttagtctgtgtgctcccttccaagcagccacggccctcccatgaaaaaaaatgccatgtcttaatcacccagagaatagaccagtctcccctcctcttcagattaggttagtttaaaattttacctgctgggcacggtggctcacacctgtaatcccagcactttgggaggccgaggcaggtggatcacccgaggtcaggagttcaagaccagcctgcccaacatggtgaaaccccgtctctaccaaaaaacaaaaaaaaaaatacaaaaattagccagtcatgatggcaggtgcccgtaatcccagctactcgggaggctgaggtaggagaatcacttgaacccgggaggcggaggttgcagtgagccgagatcgcaccattgcactccagtctgggtgacagagtaagactccatctcaaaaataaataaataaaataaataaataaataaataaaattttaccaagcaaatatcaaaacctcctatcagtgattaaagttcaagtctgtattgaaagcatccatccaatgaacagaaagagtgcatctttaaatggacagctcattttcctttctttctgttaatatctttcaatcacatatgagttaagattcattttaagttttataggcatacatctgcattagcatgcaatcagtatggtgtatttacactacatgagtgtgttcatatggatgatgtagtgtaatatatcataggctgaaatcctgtaattgttctgatgttcttaatgcctgacttaatccttctcactcttatttcattttttctcattttttaatgttttcccaactcaatcgttgcaatctaatcaaccattctatccccaaactatggaggggaattttgcaacttgcatgtaaatggttttaaaaacctggtctattattgtcatttctgatagcgccactctcttctgggaagctggttagggccacacaccagctgtgctctcagcgtattgcctgtgttcgtaattaaaatcagcccaagattgtcgcagtgcttttatgttcgcattagatcaaactggaaaatttaaaccctcaaatgctcgggtggaggatttgcaaggggagaaaccctactccccgaccccaagctggaatccacatctaatgctctctcaaaaacactgtcctaaagacagcatctaataaataatgtttttagagtttctcatctctagaacttgtatctcaccctgcagatgtgcctgttagaggaaccacaggagatttgtgacctagagatactggaaatgagaaagaaaaaaaatattccttgaggtttcctaagtcttgcagagtgtggtaaatactgtgtgtgaaaactgcctttcaaggcttctgttgttactgccccccctccaccccgcccttgtctgtgtttgaaaaccctgtcccatgattcaatgcagggtgttgactttggatacacatctccagaggctggccacacctgaatacactgagcctctgtgcaacttcttcctgtggagtaaaaccctccagcattctcagaggaaagaggcacctcttgatcactccaggaggtggaaacagttcctgtttaaaaaccaagtaaacccctctcattgcaccccctgctacttcagaggaacacctccattctgatggaaggaactcgtacttgggtcctggaaccctatttgggacccaaacctctcccacttgtgtggcctgacgtgcctgagtgctgtttgtgtcctttttattatgttgaaaactttgttattccaaagaaacatctgaatcacagagcttagtttcccagcatgtcggaaagctgggtgctggtgtaaaaaactcagatgtggctgaaaagggaagtaatgagaggggagaaaaataagaagaaagagttagggtgaggctttcacctccctgggttcttgcctggctcctcctagctctaatgaagggctgtccctgtccccttctccttaaagactgtccctcttctcccacctgctgggcaacgtggctgtcacctcgtcattccaagaaggcagcagggtgtggcgaggaagtgccacactgcctgggttcaagggttcaaatcccagctccaatatttcatagctgtatagcctggagccatgcagctcatctctcttgcctcagtttctccaagtctaaaatggaaatggtaaaaggaccaacctcctagggatgttgggaggattaaatgagtaagtatggaaggtgcctagaacagtgcctggctagatttgtgtttgctgcagtcattactcagccttttctctgccttccatccccaggaattatgaattacagagttttccctaatggaggtgtcactgtgcattgctggtttccaagaagccattgccaagttaaagtgaaccctttgttgtccttttttttttttttttttttgagatggagtctcactctgttgcccaggctggagcgcaatggtgcaatcttggctcattgcaacctccacctcccgggttcaagcaattctcctgcctcagtctaccgagtagctgggactacaggcacgcgccaccatgcccggccaatttttttactttttgtaaagaaggggtttcaccatattcaccaggctggtcttgaagtcctgaccttgtgatctgcctgcctcggcctcccaaagtactgggattacagtcgtgagccaccgcatccgacctcattgtgctttctaaaccactcccgggccccagttgggagaccccggttgtacattaggtacaaataacccatcagataggaatctgctccccgtaccccaccctactcccacctgcagcagtgaagcaaggccatcttgaattcatttaagaacagagatgagaagtgtcaagtcaacaaagtctcttttctgacatgttttgtgttggtgcttattatgtttcctgtgtggttttgttatgaggacaagaaacaggctactctacctgagaaagaaaatgtcacccgcatgttggaaattcaccctgacccaggcagtgataatagcgtgccaccgctcgctcacacctctcttcaaagtggcttccttggcttggtcatgagctaatctttaccttgtggctttttctgaaaatagacttgtcaacactcagtccgagtctggcccccagtcactggttttctctgttgacaggctgcaaagaatcatgcaggaagggctctgtccatgaattcccaatggtcatgggtggtcagccagctcagagctgatggtttgggtgggggcaggcaggacacagccatagtctcagctcttactaggggtattcgttttgtgactcacattcccccaggtgctcacagcctgtagatacccttagggtcacaataattgtattaatttagactccctggctctctcctggcccattgacaaaacctctgttcacttccaaagcccagcagttgcagctgggagatcccaggagtatctcgtgcggtggtgaagtgatccgatcacacacctttcctctccggtgtgaggccctctgctttgaggccacttgcatcccagccatgttcccccccacccgctgcttcctttggggagaatgcccccttgtgagtccacgcccccctcaagctgccaggcctcatgcatggggccagagagctagggtgcaaataccatgtgtaaagggaaaagtgtcctgacctcagctgcccttgtgccctcaggcctgtgcccaccgttggagacaggaaacacctacctccaccttgccctcaggcagcccctcctgctggagaccagctcctcagtcctgtccaagtcccctgagggcagctgggaagcccctgtctttttaggagaggtctcactgttccaccccctcgtctcttcccccttcctggaatggaaatttgtcttctgacgctgccacctggcagcaggcgatggctgtggcgagactactcagaatggcagcagccaccagccccgagctctgatcactccctcaccactgcaggatggcgaggctcccaagcctgcaggacgagaaagggagtgttgacccattttacagatgaagaaacaggcctcagagaagtgtgcagtgcctttactggtgtcccagaccgctgctggcagaccccagatcccatgcttgtcaccttcctgagcgcctagtgagctgcctgacacagagggcccagagaatagcccagaacagtgcagctgctgctagccttggaagcaggtgtcccattgagctataattaggccccttggttttaaaaactggtgtggattaaaaaggctcagtgagggtaggatgaaatcaatgattatggaaatattgtgctaaatttaatgacagtcggccctgctttcaaattgcttgctcctgtcagagacattttataaaaattttccgttgagtagttgagcagtgtatccagcatttcggggataggatgtgttttgttttttggtttttttttttttctctgtgaggatgcccagtcatcctgtttttcctttctgcagcagctgcacagccatggagggaaggctctggaaccttcttccttggggaactgggttttattgccagttatagcttgggtgcgttttttgttactgttttttattgacttcaggagctgctgttctgtgctcgcttagcttcaattggattttcccagaagtggctttttcattgaactctgccctcgtgtaactgtcgttacttctcactattttccaggtcgttctttgtttctaagataaacaccgtggctccctcggaccactccagggccccctgcagccctcactgcctcccttccccccaggccctttcttggatctgtggcttgcagagtctgcacccagtcaagggtttggaaagattcgggagacacagaaaggcctacaactgtttggatctttgttttctagaaatagagcacccagagatcttaaaacccacttttggcatctgtagttccgttggcactctatagttccgttggcattttgcaaagtcctggcacttacgtgagtgattcaggtcatctactataaaggatacagttttttttttgcatctgcgtagatacaattttgtgtcttgtttgtgccatcttgccccatttactgggacttcacctcggtaaggcagactagtgaatcttaggtggatctctgctaaaagatcccagccaaactgcagttgcttcagaaactgaataccacaagagggcagtaaagatttgcaaatgaaagattccatgacacctgcacacaacaaacagcaatcaactgttgcctggatgtctttacattttagtggacatagagatgagatcaccaccttgtgctccccattgcttcttggctttagaggatcttcagtgtgctgcaaagaagtcaagggtttcccaagagctggatggctccttcagtctattcttgcttgcactgggccccagcccattttctatctccccgggtttttttttttagcaccagagaattacccacttcgaagccatgttgctgacagtctgaaaaactatttactttgatgatgtttctgagttcatgtgattcttgaccctgccacagccaacccataaagccagtgtggtggtaattccaaaggggagcattcgagcaggaaaaggaataggtttccaaaaatgattaagtgcccaaagttctcgaacaatgctatgtcatggctgttgcagtgcgcactgggccttcctctaagccgggcatcagacgcaagtgtgccatcagctagctccctggtgggagaaaaacattgttgcagatggaaaaacttaaggtcattggtggggaatcctcatgtaagcctggagatttagcaattggggagaacgcggtacaagggcaaaccgcctttccaggaggtgtttagcaggtgagacaaggcgtgcaccaccaagattagcgatcctaacagatgtgtcaattatcaacagacaaatctgggaaacagggaaaaatttggttggctgcaaagaaaatcacacaccgggatactagaggtgaatattatgtggtatgaaaagaaccaagcacttcgcagtttccacatctggcaaagtgccaacacgtcagggtcccacgtttctccttggagaatggctcagttgccatgacaacggaggccctctcgctgcctgtgaatttattttaaccgtggcaacagccaaagtgggtgtgtccatgaaaatatttcttgttaagaaaacgattgaatgtgttgcccttacattttgctctgctgaatacatacttcattcaccaccattgtatggctgcaaaatttccttttcctgtgctgcctggcatagcaagcattgtggaagagcctgaatagtgatttaattctagtgctcttgagattcttaattgtcgctgttgtgatagattaagaagatacagacattgtactgaaatctaactgcaaatgaggatgagtgatttgagaacctgcgtgatacagggcaagggtcatcgaactgcaatccacagcccagaccccagcggctgcctgtcttcaccattaaggctttattggaacaccttccctcctttactcacttttgcagctttcgagctacaatggcagagttggagagttacaacagagacagtatttggcccacaaagccacaaatatttactatctggacctttacagaaaaagtttgctcaccctcgatgtaggaggaagagcactaggttcaaaggctggagttctggattcagagctcaggatggaaaactgatttagacatatcgcggtgccccctgggctcattctcctcatctgtaacatgggcagccttgatgagactatccccaagttgcttttgaattctaaaagctctgtcatcctcctgctgttagtcaaagattacagcccagatggggcaaccttagcacagggaaacgtacgggatgatccagcatctagtttcagggcctctgtagagaacagagcgtccttctcttcctccaccagcactgccacgaagcggcgcagaggctgtggtgaagttagctctctagacctcagcatcttcatctgcatcctaggcaggtcagactccccagggacccttctgtggctgacagtctgtggttctgaggccctcgctgcagttgccagcaggagaaagaatgactcatgcctgtgatttgctggtcacctgtgattcccgcctccgggagaaaactccaagtagcaggtgttgacccagttgtgtgggaggaatcacccaggcccttatttccaggttgcacttacagatcggattgtgcaaccagaaaaatgccgtcagaaggaagtggggtggcttgggggactgacttactaaggatcactgttaagctctccatacaaattagctccccttctgtcttagtccactcgggctgctatagcaaaataccataaactgcatggcttacaaactgcatatgtttctctctcttagttctgaatgctgggaagtctaaaatcaaggcaggtgaggtgtctggtgaaggctcactttctgattcacagatggcatcttctggctttgcccacacatggtagatgggatgaggagcctctcaggcctctttttattaaagtttttattatttagagacagggtctcattctgatgcccaggcgggagtgcagtggcacaatcactgttcactgcatcctcgaattcctgggctcaagcaatcctcctgcttcagcctcccgagtagctaggactacaggtgcacgccactgtgcctggctaatttttaaaattattttttgtagagatgggggtctcactgtgttgactaggctgttctcaaactcccagcctcaagctatctttctgcctcagcctttcaaaaatgctgggattagaggcatcagcctgggatcacacccagcttccaaggcctcttttataagggcactaatcccattcgtgagggatccaccctcatgacctagtcaccttccaaaggccctgcctcctgacaccatcatcttggggctaaggatttcaacatgtgaatttgagggagacacattcaaaccatagcaccttccaagaccactttctgtgttgtggaagaaaagatgtgtttttgttttgacatctgaacataaaacacatatacacagccacatgtgagaaagaagtacagttaaaaattccaactgtgaatttagacacacaacccaaaagaaaccaagagcctgccttcaggaattaggctgccttgactctgggcttcttcctcttctctttgactattcatggtgagattaaaatgtctgtccttgtgcagctgggcacaagggtacttgtttgtgacctccccaaaaaggtcacaaacaagtaattaatgtttcattcatccaggaatctatcctggggacttcaaggatgcacacatatttagaccacaaaattgttcatctgcatgtcattgaaaacagaactaggaaaaacctaggtgtctaacaataaggaatggttacatcagctacagtagagccgtgtagtaggatatgatgcagtcactcaaatcatgtggcagaagagtgcttataaccagaagttcacaataagcaaaggggagaagcaggttacaaacaatctgattctatctgtatcacataggaaatcatgaaaagaaaggattaggaaaatgtccaccagaatgttattaatgattacctctgggtaataaaattataagattttagtatatatgctgccaaaatgagtataaaattttagatgttttaggccagccgtggtggctcacatctgcaatcccagcactttggccgaggtgggtggatcacttgaggtcaggacctcgagaccagcctggccaacatggtgaaaccccgtctctactaaaaatacaaaaattagccaggcatggtgacatgttcctgtaatcccagctactcaggaggctgaggtgcgagaatcgcttgaacccaggaggcagaggttgcagcaagccaagatcacaccgctgcactcctgtctggaagatagagcgagactccgtctcaaaaataaataaaaataaaattatagatgttttaaattttgttctcttttttctgatgtatccatgcctgttagattttctaaaatgagcaggtatacttttacaacaagaggcagccttgctgtagaaattattttaaagcaacatttctgcctcttaaaaatgttatatgaaaagctgccttccccatatactctactcattgcttctgcaaatatttgaggaccaccatgccccaaacaccatcctaggcactggagctgtgccggggaacaaaacagacgagccgtgcgtgctcatcccagtggccgaagaaagtaacaaacaagtagagaaatacaggattggtaatgagaagagagggagggagtatgcaccacagaaaccggtgcagggacaatgtcagaaggagtagggagcctcggggctaaagcatcctttgagcagagatagaagggagtcccgtgcctatctgggtcagaggaagtgcccaactgcaaaggccctcaggcggcagcgtgcttggcgtgtcccagcagatgaagtattgagccagagaacagcggacattttatttactctaactgtgctacccaggaggctgtcatgcccattaagtagcatcattttaacctgttgccccgttaccgagtagaagataatagatatcatgacttggagcttattagaaatacacaggccatattccactaacgataccgtgaaaaccctcagttcctttgtggctttctgcttcgaaacacttgatctctcttaactaacgttgcagtgggtgcaggtaaaggcattaccttagaggtatgatgctgtgctgggcatccttggttatatatggcatggctatttctgttaaccatgccctgttacatggaatagcaatgaatcaccatcagtgttgttttgccagtgttgttcagattagctgtgaatacagaggactttcatcgttgtacaaaaaatggtaggagaaatccacaattattcatttgttcctatggttggtcatcgttggcctgtccgtggaatcttagaagtagaaagaagcttctgttgtcatctctccacacgttgcaactgtctttgataagtatattactcaaagccttattttcgagaatgctaagagatcatgtatttttgaagacatatttacaaaataggtgagaatgaacacatttaaagtggaatgtagttacgttactggaaagaagtcccaatccagaccccaagagagagttcttgaatttcatggaagaaagaatttggggcaagtccacagagtaaagtgaaagcaagtttactaagaaagtaaaggaataaaagaatgggccgggtgcagtggctcacacctgtaatcccagcactttgggaggccgaggcgggcggatcatgaggtcaggagatcgagaccatcctggctaacatggtgaaaccccgtctctactaaaaatacaaaaaaattagccaggcatggtggtgggcacctgtagtcccagctactcaggaggctgaggcaggagaatggcgtgtatccggaggtggagcttgcagtgagccgagatcgggccactgcactccagcctgggcaacagagcaagattccgtctcaaaaaaaaaaaaaaaaaagaatggctactccataggcagagcaacccccaagagctgctggttggctatttttatggttatttcttgatcatatgctttaaaaggtgtggattattcatgagttttctgggaaaggggcaggcaattcccagcactgaggggtccttccctttttagaccatacggggtaaccactggatgttaccatggcatttatagaccatcatggcactagtgggagtgtcttttagcatgctaatgtattataattagcatataatgagcagcaaggaagccagagggtcgctttcctcgccatcttgattttggcaggttttggctggcttcattactgcatcctgttttatcatgagggtctttatggtctgtaccttctgagaacagtcctgctgacctcttgttttatcctgtaactaagaatgcctgacctcccaggagtgcaaatgcagcccaacaggtctcagcctcattttacccagctgctattcaagatggagttgctctggtttgaacacctctcacaattagacattaaacagtacttcagaggctgcccaggagttctatgatgatgagatggacccaccgggagccctggagtaatggttcagtttctgattcttaactgtagatgaatctttggacctgtattcatactggagataaatcagcaccccttgtaagaatttctggacagagggctattgtattagaggtcagaaatttctatttttatggtctgtctgattttccatatagtgtatattcattatataaaattcaaacatagcagagtgtctatggtattaagttaaaccctttgaaattgctgttaaggtgggttagactgtcacactgtcacagcttagcagctgcaaacttttaacctattagaaaatgaacgtctccagccatccagcccctcatagatatacaatgtaagtcatttgtcacaaccaccctcaattttaatttgaaaaaacccctaatagggagctgaatgtggagagcttctcacattacacatggatagcttcagacacagatgtttttacacatgtaccataacccccatgtaggcgaatttgggtttgcaatattcagattcattttgtatgatttgctttacagaatgccactgcaggagctctttgaattgttaatagcttcagtgattgcaaactattgtgacttttcaagaatgtatctgtggtataaagtgagacgtgtcagtcatcagtaaattttcaaatgaggagggaacactgcctggtctcacagcctggtcttccaagtggcatcacaatgccaaacttgaaccaaacgtgaatatgccattttttgaggaacctaaaaatcctggattctgggttgttgaatcatagccaataaactgtgaggtactttagtcccattttgaaaaaaagagcatgctacagcttctgcatttaatgtcacttcattctattcacaacattacatattgtagttcccatttttatttccttttaaaaatttgtgccattttattaagtcagggtcttttcctactgcagtcttaacccagaccccttagagggcttcagcaggctttccggaagtcagggtggatagctagagccaagacccattgcctctcctgccccccttaggagggtgtgggagcccacggggatgtgcctcaacctcacaacaggtcatgagctcctgcaaagcccatttgtagcctcacacatctctgcaggtcacaggtttctggtctgtgagttagcccacagaactctagcccaggcagcatgcagttgctcattgaatcccagaggccttcagtgtacagtcacggagcaggtgcatgccagaagcttgaaggaaagtgcagtctcctgcactttgtctcctttctgggtcaaagcaaagaagaccagagtaatgttgggtgcggtggcttctgcctgtaatcccaacactttgggaggctgaggcaggtggatcacttgaggtcaggagttcaagaccagcctggccaatgtggtaaaacccatctctactaaaaatacaaaaattagccaggcatggtggcatgcacctgtaatcccagctactcgggaggctgaggcaggagaatcgcttgaacccaggaggtggaggttgcagtgagccgagatcacaccactacactccagcctggtgaacagagtgagactccgtctcaaaaaacaaaaaaaaaaaaaggaagatgacgaccagggtggagggaataaagcatggggtgctacactagagtccttttgcaaaggataccttatttcaccttcagtgcagtccagagagagagcccagcatagtccagggacacagtcttcttactactatattacagataaggaaccgggggctcagagaggcagtgtcatttgtccagagtcacacagcaaaaatgggtaagattaagatttgatccgagctctttggaatccaagttcagggctctttccagagttgcccactggttttatataataattgaagactgtggacggtggaaagggtctcagagacgagtgaatttgacagggatgttggaacttggagaaatgtcccaactgtcttagatcagcatttctcaaccttaaatgtgcacaggacccacccaaagattttgtttaaaatgcatgtttggacttagtagatctgggatggggcccaagagtctgcatttctgccaagcctctagctgatgctgctggtcctaggaccagtgcccagctacttgggaagcttaggcaggagaatggtgtgaacccgggaggtggaggttgcagtgagccaagatcgcgccactgtactccagcctgggcgacagagcgagactccatctcaaaaaaaaaaaaagaactgaacagacatcatcagagctgaaaggagattcctcctggtgcaggggtggaggacagtttcacaggaggatggcagcactgagagccatgggggtctccagcctgtggactgctgctcagagcctggtcccccaccgctttctttacctaacttggaaatgagtgagatggactcaagatttgggacacatcagcaggagcgtttctaatgagttaatatctgcttgaggtcagcagcccagtgcatgctctgctctgagcattcattcatcttcaggggacattctgtgtttctgcatttcatcctctgcattcagaattttccatttgctcaggcccccagcagggcgtctggccacgttgggccgtgtttgtattgctggagtaaaggatgccagcacacttactcttctgcttcctcaggttttctgaaatctctgcagttaggctgttagcttcagctttatccctagacgtatattgattttatttgcactcctggtgaagtctgaattatagtcatgacaactagagttatgtcaacaatatgcaagccaggaagggcaggtctcttaattctgctgggaggccagttgccaaacaatacattaaaaagctcagagaaagaaaaatggtcagctcagggctcactgttgctcttgagccagagatcccagctggatcttgggcaagccagacttctcagcagaggaatagcccttcagagaaacccttccaagggcatggtttcagcttgctggcctggctaactagtctcgtgtggcctctggggagggtcatcatgtggccaaccaccctaaaggcagagagccctcccagcacttctctgtggctgtcccagcatgaacagtgattgcttgagagaaggagttcagattatgtatgaaggtgcaaatgcatggagttctgggctgcttgtctgcaccagctcacctgactatcagctgcctttttatgttagtttgtcatctggccaactagtgctggctacaagttggcctctgtcagttctgtcagtcttagtgcttaatgagcacaaatgtgaatgaatgagagagagaactctgagttttgaatgcatgtgcctgatatagtgcttggtctcaagatacaaacttgagtaagacttggtccttacctcctaggatctcacaggctagtgaggaagacagatcaataaatccaagaagaagaggctgggtgtggtggctcacacctataatcccagcactttgagaggctgaggtgggtggatcacttgagctcaggcgtttgagaccagcctgggcaacatggtaaaaccgcatgtctacaaaaaaaaaaaaattagctgggtgtggtgatgtatgcttgtagtcccagctactcaggaggctgagatgggcggatcacttgaggtcaggaggttgaggttgcagtgaaccatgatcatgccactgcactccagcctgggcgacagagtgagaccctgtctagaaaaaaaaaaaaaaattccaagaaggaatgtgtgttaagttccccagaagctgacgtagccccatggttttgagaagttcattcctgaagggatcccaggagacatgggtggggagtagagatgggagccaggtaagggtaggacctagccaaggttgtgttctcaagctgatgaccactgtgggcagctggagctcggtcttcttgtgagctggaagaacattctggaacaggcttcctgttcccataactcgggcacctcgggctccctctgcaggagtggtctgaatggaaccctcaggtgttcgcaggtgtgcaggacagaaagctcaggtgtttgcaggtgtgcaggacagaaagctcaggtgttcgcaggtgtgcaggacagaaagctcaggtgttcgcaggtgtgcaggacagaaagcgcaggtgttcgcaggtgtgcaggacagaaagctcaggtgttcgcaggtgtgcaggacagaaagctcaggggatacgggtggggccctgtctgctgcaggttggaaattccagagaaaccaaaaggaggcacttgagttggactttgaaggtgaacagaacagcaagacccctgccctcccagacttgcagtcaggtggcaacggtttccgggaagaaagctaactgggagaaggaaggagtgttggggtttcaggaagaccactgtggaggatgactgtgaacagcagaagagggaagggcggagctggcgtcccaaggcaggagacaggtgggagcttgcggcaggctggcatggctgggaccgaggcggagggagtggtgggaaataagccgagagacagagcagagcgagtgtcctcctcagccatcaaagcactcagccttctctctgtcgtgtgggaagccggtgaatccaggacaggaccactgtcttttttttttttttcgagacagggtctcactctatcacccaggccagagggcagtggcacgatcttggctcactgcaaccttcgcctcctgggtttaagcgattctcccacctcagcctcccaagtagctgggactacaggcgcccaccaccacgttggctaatttttgtattttttggtagagacggggtttcaccatgttggcaggctggtcttgaactgctgacctcaggtgatcctcctgccttggtgtcccaaagtgctgggattacaggcttgagccaccgtgcctggcttctgctgtcattttagcagtagcccgccagcgagagcaacgggacatctttggggaggggttttgctgcccgtgggctaggggaggtccccaaacgctggtgggacctcgacctcagctggtgtccaggctcttgatactgccacgggaaggaattcaaggatgagtcagaaaatagtgaaaaatatggagatttattgcaaagtgaccagtacacacttgagaaagggaaaggcaggcatactccagagagagtggcgtgcaagggggtttggggcctgctacctttatgggcttctttaaggggtgggatattcctgaagattcccagaaaaaggtggagatttctcagaaatgtggtgccacctgtttttacactaaatattggtgttcctggaacggccgtggcactggtgggtagaggattgaggatgttaatgagtggacagtgaggtcccaggtgaaactgggtcaaatccagcaccatgttgggtccagttggtcttagccagcttggcccacatcctgatgtttagggtcttgtgggcccctagcttatgcagttatttcaacatttttttttcttttttgctagtcccgtgaaactgctgcctggaattttctgttctcctgctaccaccttgtattattcctgtttgagttttcttgaagaaatagcagttgagctgggacctgaagaagtgggagaggtcagccaggctagggatgggggagaaacggcaggccagggaaggctgggtcttcaggaagacagaggaggtgctggccaaaggtctggaggtcaagcctcgcgctgcatctgatcttgccctggcgccctgcccacctggaagtcctatatggttcctcgtccccctgccctcaggcatcccccacccccagtgatgtagctgctcggatatccactggctgtctccctcaaccccagcattgattagacccagactgaaagtgggacttgctcaaagccggcccagacccctgaggttgccgtaccgtggagtttcctaccataacagagctgctttcaaaaactcagcattggatggctctgtgtcctttggcagcaaggcctgcaggtggcagcgtggagatggctcagggagtgtgttctgtagtggaaacagaagtgctgctcttgattgggggagcaagggcgtgaagatgctgggtctgctctgatctcagggctggcttgggctggggagaaatctattctgaccctctgggccaggccactgagaagctacctctctgatatggacgtggtcagcctgccctggaccccacacaccggtctgtctccttcccaaacagctgcctgttctaccagcctccagaaactcagctctgcttccggctgaaaagaatctgcccaggcagagcaggaagcgtgtggcgtcctctgcccagctccaccttgtgcgagcaggtgtctcctttgtggatattgctctcaaacctggtgattgatttgagacctgaggccaaggtcatattgcaaataagttcagaagtacttgaatgtaaaaatgcttctgtcagcctttagcctgactgtgagcagtgtctcatgcttataaccagactaatatgataacatgaaactcacaaggccgtcgttaggttatgtctgcagttgaggcggtagatggcaaagtgtgtaaaaaggccccctgcctatctggaggctcatcactgcatcagcccacatcccctgactgtggtggtgacttgtcaaaggaggaaggcggaatgactgtctgggaatgtcagaggagtccagcatagctgggtagaactgcgtgctacagttggaaactgggcattcgttggtagtatgaaccgcaacttcacccaggtgaaagtagtttttaactgtttcaagcatctcagatcagcaagtcagttgtgtttgggtgttttcagatgttattgtgaatcctgagaaaatacgattaatctgtgcctctttctggtaacttttttcttattctaagtcagaagtgcagagcagggtggcatagtcggtattctcatctcaaatttgcacttcctatgtattcttttaaatttagacacaaccaattgggtgcggtggctcacacctgtaataccagcactttgggaggccgaggcagatggatcaggagttcgagaccaacctggccaacacagcgaaaccccatatctactaaaaataaaaaaaaattagcttggtttggtggtgtgcacgtgtaatcccagctactcaggaggctgaggcaggagaatcgcttgaacccaggaggcagaggttgcagtgagctgggatcgcaccactgcactccagcctgggtgacaagagtgaaactctgtctcaaaaaaataaaaattaaaaattaaatgtagacacagcctaggaagtttctcaacttagaatcattgccggggccagtttttagaggactgggctggccctgccgaagtgggcaggccagtatgtgtagcatcacagttcatgttttatctttatgggccttctacgtttccagtggccccaaattcacaggtgtttccactacatgctgccaacaaaggcagagctcagccgtgtttcacactttcagtctggaagcaaaaatatcagggccatctctccctcatgttttaatgtctctggtcaaatgggggcactcaactcatcagagcatgttcacaagccctgagacttgatccctgtatgagcgagttattctttttttttttttttttttttctgagacagagtctcactctatagcccaggctggagtgcagtggcacaatctcacccactgctgcctccgcctccccagtcccagttcaagcaattctcctgcttcagcctcctgagtagctgggattataggcatgtgccaccatgcccagctaatttttgtatttttttagtagaaacagggtttcaccatgttggccaggctcgtcttgaattcctgacctggtgatccacccacctcaccctcccaaagtgctgggattacaggtgtgaaccaccatgtctggccacaagcaagttattgttatcggagaaaagcatcacccaacagcacagcatctgataagcacatttgggcttcagttctgtatttgttcagccagagagctgagtgcatgtcctgtgccaagcactgttagagttgggaatctagacacagctggcagtgtcacagggtgaaccccaaaattggggttcagcctaagaggccacatgggttcttggctttgggcgggagggaattcaagagcaaacctacagagtaaagtgaaagcaagtttattaagaaagtaaaggaataagagggtggctactccataggcagagcagccctgcaggctgctgattggctattttggtggttatttcttgatcaaatgctaaacgaggggtggattattcatgagttttctgggaaaggggcagggaattcctggaactgaggattcccctttcacaccatgtagggtaacttccacatattgccatgacatttgtaaactgtcttggtgctggcgggagtttcctatagcatgccaatgtattataattagcatacgatgagcagccaggagacctgagactgctttcattgccttgttgattttggcgggttttggctggctttgccacagactgttgtattaggggttctttgtgacctgtatcttgtgaaaccagtcctgctgaattcctgtatcagcaggggctcctcctgcaaatgcagaggctccccaagagagcacaagggggctcaatcagtacttgtgggatgaaggcatggtggtgctccaagagggacgacggatgattcctcggaagccttctctgctgctgatccatagtaaagccccttgagtgccttccttatctccttcaccatcatcttggtaaccaccaaggtgttgactggagtgagttcctggaaagagctccagagctaaggtctgctgcactagggagggaggtgcaccctctcattaagaatgggcaggcgtggtggctcatgcctgtaatcccagcactttgggaggccgaggtgggcggatcacctgaggtcaggagttcgagaccaggctgcccaacatggcgaaaccccatctctactaaacatacaaaaaaattagccatgcatggtggcgaatcccagctactcaagaggctgaggcaggagaatcgcttgaacctgggaggcggaggttgcagtgagctgagatcgcgccactgcactgcgcttcagcctgggcaacaagagcaaaactccgtctcagaaaaaaaaaaaaaaaaaaagaatgtatccaaggcaagaatcattgccctagggctcagggatgtggctgtggaggtctagccagggaccagggtcctggacctgtcagcagctgacgcttcttacaactagctccttcccgtcaggcagatgttcaaaattcggagtcttgtgctgggagactcagcccactccaggcttctccagggctccttcggtgacagtgagacttcccgtgggtttactgaccttcctttttctgctgagcccttttaccttttgcctttgacatggactctgaggccctggtgagagtcgtgagggcagggccccctctagagcttctaaaaactcctctggtagctcgcccaccaggcagtgaccagatattcttcaggcgcaaagggcgccttgtgctccctttctttttttttttttttttttttttttttgagacagagtcttgctctgtcgccaggctggagtgcaatggcgcgatctcagctcactgcaacctccgccccccgccccccggttcaagcgattctcctgcctcagcctcccacgtagctgggattacaggcacgcaccaccatgcccagctgatttttgtatttttggtagagacggggtttcaccatgttggccaggctggtctcaaactccagacctcaggtgatccacccgcctcggcctcccagagtgctgggatctcttcttatgcacatcaccatgtctttttgtgagttcaactcttgatttaaaagaaaaaaaaaatcaaaaaaaaaaaaacaacccaacccctgttcttactgtgcatttgaaaatagcgatgaatcatcccaatggctttgccattttaagcagttcctctccagagaacattttcctcccttttggtgtgggtacaagttttcctttatgcagattaattttaaattggaaaatctacaaatacaaaaagcatcagtacacagtttatttcctttattatgttcatggacccgaagcactgtttttcccaagaagtcgactttgacatactggaattacaaccaaccagcccttcacggatccccacgcatcaattctaggttgactgtgtaaagagttgtctcttaatagggagagcagttttctgctaccttgctgactttccctgtagggtgagtgtagctgctgatatctgaacaggtactcaattctcaccctttgttccttttctcaccccatcccacctccaagcaaacattaaactcagttacaacacggtggtttctgtcactctttccccagaaaaatgacccacgtgtttcccatttgtgcttgttatttagaaagccaaacttggccctgctggcaacaaagtcatcagtccctctgaagacaggaaacaaccttccaacaaccttgaccgagtgaaactcacggacttcaatttcctcatggtgttgggaaaggggagttttggaaaggtaagaggacagtcgtctgcaaattgcaggggcttctgcagagaatgtcgaatcagttttgttctcctcgtagtttgcagaatagcacattagatttccctgtgattcaaggtcaggagatcaagaccatcctggctaacacggtgaagccccatctctactaaaaatacaaaaaattagctgggcatggtggtgggcgcctgtagtcccagctacttgggaggctgaggcaggagaatggcgtgaacctgggaggcggagcttacagtgagccgagatcgcaccactgcactccagcctgggagacagtgagactccgtctcaaaaaaaaaaaaaaaaaaagatttccctgtgatttgtacagtcatccagaagaccaccaggatggctaaatggtagaaaggagaggtttattggtggtatcagtttgcaaacccataaaagaaagtctatggtgtgaaatgaaggtgccctctctttgaggagagaaagggcaggttgggttttatgcctcacagggtccatgttacacagtagagtcatccatattcaacaggtttggggggaaagcttgacttatctgtgagggaagcctagcacaggcacaatggatgaacatatatgtaacatgcatcttatgttcactttggggtggggacttagcattaaaatgaggtggaatttgcctaggcatggtggctcatgcctgtaatcccagtactttgggaggccaaggcaggtggaccacttgaggtcaggagtttgagaccagcctggcaaaaatggtgaaaccccatctctactaaaaatacaaaaattagctgggtgtggtggtgtgcacctgtgatcccagctactcgggaagctgaggcaggagaatcgctggaacctgggaggtggaggttgcagtaagccaagatcatgccactgcactccagcctgggcaacagagggagactccgtctcaaaaaaagtaaataaataaaaaaaggtggaagttggctctttagatcaaaaggtgaaccacaggacccaaaaacagtttgtgtgcaggctctgcaagctgctgaaactggcttcaggtctgcagttgcatcacagaaaagaatgtttgtaaggccagttctctgtccagtccaagtcatagtgatctgagttgtcaatcaaagttaggaggggcctgatagctcctactgctagggagtttagcgagagtggtttatcttgtagctgtagggatttagaaatttgccatgccagctgggccctgaaccctcaacccatagataactatttccttaactttaatgttaccagaaaggggtcctgatccagaccccaagaggagggttcttggacctcaagcaagaaagaattcagagcgagtccacagaataaagtgaaagtcagtttgttagagaagtaaagaaatgaaagaacagctactccataggcagagcagcagcatgggctgcttgactgagtatacttagaggtatttcttgatcgtatgctaaacaagggttttattattcatgagttttctgggaaaggggtgggcaattcccagaactgaggcttcctccatcttttagactatataaggtaacttctgggcattgccatggcatttgtaaactgttggggtgctggtgggagtgtcttttcacatgctaataatgcatataatgagcaatgagggtagccagaggttattctcatcgccatcttggatttggtgcgttttggctggcttctttactgtatcctgttttatcagcagggtctttctgacctgtgtcttgtgatactagccctgctgacctcctatctcatcctgcgactaagaatgcctgacctcctgggaatgcggcccagcagatctcagccttatttttcccatcccttattcaagatggagtcactctggttcaaatgcctgcgacattagggtccatcttagtcgctaaagaggcatttatttggtctctcagatcagagtgcacagtcctcacctggtttctacttccttaaaagcaactgcatccaaaaagctatagtgggttcactgtgttgttactatttctcagtgttcagaacagaagggatgctcagaaatgctggttgatgaatagttttcacaactaaaaattaaatgttcacttgtagtaagcaaatacaatcattaagagatactgacatggggtcttcagcaatttgcctgtatctccattcggtttctgtggccccacatttcatagacgcaggaactgatttcaagtctaggttcttgacttgagagattataaatgtcagtcagctttcactctaaggatactcctgaaaaatgtgcattattccagactaatcctgatagagaatgttgagtattcattttagcagccaaaatagtgccattatgtggcagtggcctataccatttacaaatcttggcagcattgaagttttgcaaatgctggagggactgaatttgtagtgatgtgtagaatttacaaatttgcacataaagtttaatatttttatgttccacattgacaaaggtgcacaaactgtcactgagccgtcacctggcctggttccttccctctgccccccaagatatgtgcttacaagtgttcaggttgttcttgacgtgttctcaggtgatgcttgccgacaggaagggcacagaagaactgtatgcaatcaaaatcctgaagaaggatgtggtgattcaggatgatgacgtggagtgcaccatggtagaaaagcgagtcttggccctgcttgacaaacccccgttcttgacgcagctgcactcctgcttccagacagtggtaaggaccctgggaatccctgcgatgcagtacccagctctcagagctacgcctcagcccaaagcttcttagcatccttgttcctttggagaaggctggagaaaggtgtgttgtgatgtcaagcagaggtgactggggaccacctcccacctctctcactggtagatttggggcatgccttctctgtgatgtcctctgcttggcattcatgccatttaattcggcaaacatttctttttctttttctttctttctttcttttttttttttttttttgagacaggatctcactctctcgcccaggctagagtgcagtggcacagtcacggcccactgcagtctcaagtagttgagaccacagatgtaccccaccacactcagctaatttttgtatttttagtagagacgggggtttcaccatgtttcccaggctggtcttaaactcctgagctcaaacgatccccctacgttggcctcctaaagtgctgggactacaggtgtgagccactgtgcctggccttaattcagcaaacatttccatgaaaggttttcttcatgcctggtactgtgctcagactttgggatacaaaaacaaacaaacaaaaaaactcacagtcttggctttttttttttgagacggagtcactctctcttccccaggctggagtgcaatggtgcgatctctgctcaatgcaacctccacctcccaggctcaagggattctcctgcctcagcctctcgagtagctgggattacaggccgctgccaccacgcccggctaatttttgtatttttagtagagatggggtttcaccatgttggccaggccggtcttgaacttctgacctcaggtgatccacccgcctcggcctcccaaagtgctgggattacaggcatgagccaccgcacctggccacagtcttggctttttaagaccactggttccactgccaaacatggcattggagcataaggagacttgattttgtaaaagagcatgttcttgttcaatgccacacaacagggactggcaaactgtggcctattctctatggcttgtgagtttaggaaaggtcacaacaaggaaatccaaagagtcatatatcgtgacacgtgaaaattaggtcaaattttaaatttcagcatccataaacagctgttttgggacatcaccacactccttcgtgtacctgtcatctacagctgcttttgcaccatgaaggcagagttgagttgctgcaagagacactcacagcctaaaatattaatacatactgtctggccctttgtggaaaaagtttgctgagctctgtcgtaaagtaaaactaaacagaggacaaaaaaggacattccaaagcactaatcagtccgttgcagggcttgcaagtggcctacaagaaacagacatggccgggcgcggtggctcacgcctgtaatcccagcactgtgggaggccaaggcgggcagatcacgagatcaggagatcgagaccatcctggctaacacggtgaaaccccgtctctactaaatatacaaaaaaaaaaaaaaaaattagccgggcgtggtggcgggcgcctgtagtcccagctactcgggaggctgaggcaggagaatggcgtgaacccgggaggtggagcttgcagtgagccgagatggcgccactgcactccagcctgggcaacagagcaagactctgtcttaaaaagaaaaaaaagaaacatagatgtttagatgccaccatagtgagacgttgccaaagctggtctttccactcctcagaggctgcccatttaaaatatgactccataatcagtagctgtaattgatgcgattattactattttcaactgcccattgatcagagattgactttctgtcttatgcctctttgaaaactcttgggaggaacctctcagtgcttttgtgttttagaatctcaaaatggctttgcagccacccggagcctctgggtgtgtagcagtggccgcggagtcaggcgccggccactacgtgtcagcctagcgctggcggcacgttgagcttcctgctcccagccgttcccactgactctgaatcaagtcacgccagggagagatgagagcagcatgctcggaagagacaaccacagctctgaatcccagcccagagcctgtaaccctggttaccctgattaagctctggaaagctacaaaacaaagaaatgaagatgaaattaaagttcataacaggaaagctagagactggggctcccagggttgcttcctggctattagcaccagcttcatcatttttttctccctgtgcagcactttaatgtttaatatcctctgtgaaatggggatgttttctagcagagagcagaggtcattatttcactgttaaacccctccatcttcctatctgtcccagcataatgtcctcaggaatatgcagatttatttgggtctatgatacatgcccatcatggggccaacacttagcctaccagtgacagagaaaatagaaaaacagtgtttgggcatattacagatgcaaaagaacatttgattagcatctccatctagagtcccctgtcccatgtccagtaaatatattgagcatgtgtaatcctaagcctgagagatgtgttttcaggagtatccatttaaacacgatactacattagtatggcacgcctcccagacactgcaaaccagcctttaaacatttggaccatggagaagcactagttaaaatgaaataattgccttatgtggattcctcacaccatcccttacttagaaatttattatatgtataggaagatagggaagaatgttcaaggccgttactataatagcatatgtaacaggaaggcacgttgatggagagccattatttcagggttatgtaatgactttatacttcccaaggccctcatgcagtagggtttattacttattctttctttggaaaaaaatgtgaaagagctctaaactgagcacatctgcccatgcagtccccatttaactaatgagaaagcaaaacacaacctgtgaagagcaaaggaagccacttggctggggaggagccctgctcatgtgttgaaccttggtctgcaggatcggctgtacttcgtcatggaatatgtcaacggtggggacctcatgtaccacattcagcaagtaggaaaatttaaggaaccacaagcagtgtgagtattattttttaagtcctttaatttgaacaaccaagtcctaccaactggaaacttccttttttcccccccgcttgagattgggggtctcactctgtcactcaggctttgcctcccaggctcgggtgattctcccacctcagcctcctgagtagctgggactacaggcacacaccaccatgcctggctaattttctgtttttggtagagatggggtttcaccatcttgcccaggctggtcccgaactcctgagctcaagctgtctgcccacctcggcctcccaaagtgcggggattacaggcgtgagtgagccaccatgcccagccccaactgggaacttctgctgggtgaaatgggaaagtgggattctgcccagttttaggttgaatgttataaacctaaacatgggaggcggagggcagatatactggtaggatccatctaagatggttcctaaggagcagtttattctatttccagtatttccaataaactggagatgttgccatatcccatcatcacccaggtccacccttgttgatggagttattcttatctgttgaacaaatggttatcacacacctgctctgcaccaggcactggggttgcgaaaggaacgaggtgctccctttccagagggagtttacactccaccctggaggtggagaagtcacctaacaattaatagtgcgttgctgtaactttagagacttgcgcaggataccaggataacacgtaagcccctaaaaatcggggagagggaagtgcaaccccacgaaatgaccggctcagaggtgggggaagagccttccaggaagagatgtgaacagaggcagaagcaagtccagggaagcagccttgcagctcagcaggtgtgggagatgctgtgagattatttgaggggcgggggaaggggggaacgtggtaggtggggctctgggtgaagagcctggtaaggagcctggctgtggaggagggaagagggaaggcactgcagtggggcttgcaccatcagattcagtttttgcagagctctctgggggaagaaggaagcatgaaaggaaatggtagaggctggtgcaggcgctggtgagaccctttatagataagaaggaatggagctgtagttagggctagaccttggagccaaagaggaataagtgtctttgaaaaacaccctggaggaagaaaagcagaacttattgactatggaggagagaagagataaacctcttccagtgagaccccatttcaggcttgggtcggggcagccaccaaggaggaggtggtttgaggggggagattcatgagctcagttaagaacgttttattggaacgcacctgcatgatgggatgcgggagtcggcagcacaggaggaagacgtgggctccaggtgaagatgagagattcatctgaggggtgtggggagctggaactttggtgctggaaaacatcatctcacctctcaggggccaggaagtctcaggaaacaccagtggagcaagcctaaacaaagggcgagtttagttccgcagtgaggaaacctcgggggcatgtaccctgatgaatgaagtcagcacctgttaataggattctggctgctgtgccatctaagagacacattggaagaatttttggcctgcgagggattatgcaccctagggaagattaactgaaggcagaatagggaaatctttggttgcaagctttaaaagtgtgaagggggatttttctgcctttattgattgttccttttcagttttcagaaatgcctgtccttttcttctgtcttatgttgtagttataaagccttaaaatactcagattgtaaaataaagcttggtcacacaggactgtaaagagcagatagcagagtcaccctatgttataaagtaacataaaggtgtctggtccaatatcctttcattatattatttgtgttgcagaaaagtttagaaaagcatgaaaaataatgtaaagatcacctgtagtaatcccatctcttcaccctccccctttctgtactcttctagccttcagaggtggcccctcgttaagggtttggtcttgatcattagagattttttttcctctctgctcgtgtagacacgtgtgcttattttgagcctcctgcatgtgatatttccacaggcacagtcttgtggcttcttcgacttcaaagactcctgaatgctatgcagatttttaaatattcgcctccttttaatctgagtttcagctattaatgtattaacaattttgaagtgatggtagttactgctttttattatgaattatttaaaagagtaaactcagatatgaatctctccaacactcgcaaggaatgaaaacactagctaaagagttcatcacccactatactttgccttccagggagtaattgtattgtattttcaaacaccagtgtattctgccagtgaataggaaaatggaaattttctttacgccatactcctgatatagaatagtctaactggtatccactctttaaatgattgtatgagaaattactctgcaggcaataagctacttgtccaccttccccataagagaataagaagccggtttcattggttttattagctgtctcattcacggataagctggaggacgaagtgatggagggaggaccgggggttggaagaacacgatgctggtctctgagagcctctgggtctgacattcttttctctctttgatgcttgaatttgagaatgtaaagtatacaggcatctaaggaagcaagtgagaaacctgaagcccgttttcttttgcagattctatgcggcagagatttccatcggattgttctttcttcataaaagaggaatcatttataggtgtgtattgaagccctcctaccagcagctcagcagagaggttagctgggcctctgtgggcatgtcattctggaatggtgacttaagacacagagttgataactccccaggaggaacagagacctgctgggacccaccttcctcctcaccctggaggcaaatcagagccaccttctgatttctagaccgcaaagactttatatcttgtttctactttttccacaagaaaacacatttttctctccattgacagctccttccactgccttttctttggaatggaggtcagggagcaatggaaactgaattcctgttatagatgttcagcagaagaagaacacagggaactggggagaggcaaggaaaaaaatctattgaattaaattctgcctgttagtagctgtgctgaaagtctggtgccaaagaaggaagaatttcttccagtattaattgaagcataattagaaggatatatggcacaggcagaatggaagggacatgtgtatgacccagtgaagtggttctaaacccgtgattttgcaaacctggtcatgtgtcagaccccctgtgtgggacatgaataaatcaaatgattgagactttcccagacgtgctcaattggaatctctagagtcacagacataggcaagattgagaatcactagtccagtcgtttagtaatccattcagtatgcatttaagcacctgctgtagcctaggcacaatattagtctctgaagatatcaacacacattgacttctgatactacagtccagggacttatagttaatattgccattgagctgacaggtattcagatatccttctatttcaccagttccaaagcaaaccatgttatgtcatgggaaggactctgatgttaacccggttccttgcagggatctgaagttagataacgtcatgttggattcagaaggacatatcaaaattgctgactttgggatgtgcaaggaacacatgatggatggagtcacgaccaggaccttctgtgggactccagattatatcgccccagaggtaggaaccccagtgatcgttttctcaaccaggactcccaaactgtaaacgcagccctctcatgggttatagggtcactggcgaatcatgaagtcagtgcatggtcacagccactaaatggactaaactggacaaaacagactaaaatagaggaaataggagagcccattgcacatagtaaggttgtgtcttgcttcctggaactgttgtttgctccatgtgagccagttgcttgggaaaatgtatttgttacatggtcatggtcaaaatcatttaagaaacactgttggctgggcgcggtggctcacgcctgtaatcccagcactttgggagcccgaggtgggtggatcataaggtcaggagttcaagaccagcctggccaacgtggtgaaaccccatctctactaaaaatacaaaaagccagggatggtggtgcacacctgtaatacctagctactcaggaggctgaggcaggagaatctcttgaacccaggaggcagaggttgcagtgagctgagatcatgccattgcactccagcctgggtgacagcaagactctgtccccccaaaaaaagaaatactgttgagtggagggaattacttgtgaaaatactctgcctggaaggcggggtgagacgggggttgcagtgatggtgtattagcagcatcgcggtgatgactgttctaaactgcatgttgtctggtctaggaagaatgtgtcagtgtggttctaagcaaaatggttccaggacttgtatcttgacagcagcggctgtgctgctctgcttttgttataacacttacagaggattttttttcctgttttatgaaacatcccacatgccaatgatagaatgggttgtcactgtagtcactgtagagccaactttccatccacacacagtcctatggatgccacagttttttcccatctgtacccagcatggtggagaccaatggatccaaagctgagctggcttcagctcttcacagagccctcagatgagctgttggcagccggtctcacatttattcaacagattaccccatgcatttatctcagagacagtagggatagtgaaaaaggcacccacaagctcagaagtcagacccatgtgagcttcaatctggaatctgttatttacagactgtgggaactcgggtgagttacttaacgtctctgaaccccgtttcttcagcggcaccttagggataatatcctccttgtagaattgctgtgtggactgaagtgcctaatacaacattttgcatctagtagaccctccatagtcattattccaaaagggaagctgctttttattcctttgtgaagaccttgtagttttatgatatttcaagacagcgtggacacatagacttcatttagaaacttaaattctgaatcgcatggccagaggtgatatgtgatcttgctgcataacttactgggattttcccccaaaagaactccctcattagtacctacagacatgaggtgaaattaaatagtcttatttttcaaatatgaggaatagtcagggtactgtcagaaatacaatctcttgatgtagtatttattctgaagcctgttactaaatgacaggtattaagcaggctgtgattatgagccattcagccttcattgaacaattcagcagatgatgtaaaagcttagtgatggggaatggcagcttttttaggaataaaggtggcattgaacctcatctctattaagaccaggtctctcctgttccgacaaatagctccttgtgttcagtaacacctcagctatctaataacaccaggaacaacagtgtccagtagagacaaaattttccatatcattaaggtttgtccatttgagtgtcttgtctttttttgttgttgcggttcggtatcattcacggtatgagttcctgttgccactgtaacagataaccacaaactcagcagtttaaaataactcagatttattatcatgtggttccggagatcagaagtccaaaatcagcctcactggactaaagtcaagctgtgggcagggctggtttcttctggaagctttaggggagaacctgttgccatccatgccttttccaacatcaagaggccaccacctgcattccttggttcgtggtgtcttcttccctcccccatgcaacgtagcatcttccaatctctctgtcttttccaactacaaccctccagcctccctcttctcctacaaggatctttgggattatatggggcccacttggataatccaggatcatctccctagctcaagatccttaatttgcctctgcaaaatcctttttaatgcataaaggtaatagattcacaggttccagggataaggatgtggacatctgttggggagaggggacttagtctatcacacttgttatatgttggagaacctcctcactgtcctcaacagggacacctaaacacacttctgtcatgtcttggtaacttcgggcctcttcatacacagagaatactctgttcttgctctagatactttcacatctgaagccttcattcccctccttacatctactgtacaagcaataatagaggaagtgaccaccttctattgtctaccgtgtgccaggcacatgataaactttctcttggctgggcacagtggctcactcctacaatcccagtgctttgggaggccaaggcaggtggatcaattgaggtggaagttcaagaccagcctggccaacatagtgaaaccccatctctactaaaaaatacaaaaattagccgggtgtggtggcaggtgcctgtaatcccagctgctcaggatgctgaggcaggagaatcgcttgaacctgggaggcagagattgcagtgagctaagatcgtgccactgcactccagcctgggcaacggagtgagacaccgtctcaaaaataaataaataaataaatacaataaaccttctctcatttaatcctcatgacaagccccacagggaggtagcatcagatctgtgtttcagatgaagtgacagaggtggttagtaacgtgtctaaggccacgttactgagaaatgccagaattaggctttgatcccaagcccaggtcacctccaaacctttgcactgctcactacactaaactgctcgaaacttgagcgactcacgtatccagacagcactctgcgtgcttactgtgcttaagcatggtgccacgagggatacaaaaagacatcagatggcccttgccctccaagtgctttcagtttataagaagtgacatcatactgaccagcaggaatgaaaatctatatgtggattccagtcagctttcgttgaaaacatcaggcaccactgctttggaaaatcaccttaaggttgtttcaccttttttgttgccttgctttttttttttttttttttttttttttgagacagagcctcactctgttgcccaggctggagtgccacagctcactgcagcctcaacttcctgggctcaggggatcctcctgcctcagtccataggttgctggtagtacaggtgtgtgccaccacctgtgcctagcctgttccagcttttgctagcattttttcctcataagtgttcagtaatttggcatatttggccacacgaatacttacagtatagagaaagatcagataggttcaaggtttcaaaatgtgtggaaaggttaaaataatatttcgtgtggaaaattcaaaatgtgtggaaaggttaaaatagtatttgtcctctgtgcaaatactcctgtcaggcagagacaaaatcattatcttgcatggcattctccttaataggcaaagcggaggcttaagtatttatggctatttgttcaaaaaccttgaaatcgattaataccttagcgtctccttaggcagcgaagccgagctgaggcaaaaaatgtcactaacagatgagagtttgaagttgaaatggacacccacagaaggagcactcatcagaaaatgattcctaaagctgacacagagggtcctctttgctttgacatagaaagaattcttcaaggtcaatgagagtccttgagcaggccaagcaaaggcttcatttggatttaatccatctctgaaacttagttattctgggcgtgtgtgatccagtcacaagtcaagtagattccagcagccaagaatcaggctccagacactagcattgcgcactcttgcctggaagaaagagaagcaggaagagtgtctgcttctggcctgtgtcccgagaaccccctactgcagtgagagcaaagcttttcattttatttattttatataattttgttctaagaactttatttttttaaagacagagtttcgctctgtcgtccaggctggagtgcagtagcaatcatagctccatgcagtctcaatctcctgggctcaagtgatccttccacctcaacctcttgggtaactgggactacaggcatgtgccaccacgcctgctaattttaaaaaaattttgtagggatgggggtctcgctgtgttgcccagactggactcaatttcctgggctcaggcagtcctcctgccttggcctcccaaagcactagaattacaggcctgagccactgtgcccggccctgaagtgaagctttttcaagtgtgccatgtagagtcttcctcacagcatcgctatggcgggggctacgttagaccacacacaaaggacatcacccgtgatacactgacttctctgcaccaacctccctgagcacttctgacttgccacatgttagtatgagtagaagttcagtgacttgcccaaggtcacatagctggtaagagcaaaggtgggatttggatccgagatgttctgaccggagcccgtacgttctttttacctattgcattgtctccatagatatgggagaaaaagcaggtgaaagtgagcactcagtttgggccacgttttcttggccactcacttatctcaacgtgaatcagggacctgagtcatgatcagagatgcagtgaatgacgcagaattgcattccagctgttatccccagggagatcccttagaaaccaagggtgatccagccacacgcaagcccctccccagcacgtgggcatcgatctgttggcatattcagggtgccccccgagtgctgggcactgttccaggccggggggtgccgggccagaaagaggagcccagaggagagctgggaggagggccttggggctggaggcagctggaaatcagtgactgcagcccaggaggactgtggattttgagaggtggacagggcagtattctcagcagtaacagatggtgcatccaacacggttgaaatttccagggaagaagcttgcagacgtggttgcctgacctgcagccagctgcctatcagcagatgggcatactcctgggaggactgggggcttcatgggtccagagagctgaagagccattctggggtcacagcttctgcgttcccgccctacaggaatgccagcccactgatgcctgggacagcagccagattcctgtatttttatgtaaaatacacctaattgttccaagttggccctaacatatgttttttaacatgtgtatacaagtgaaattcagccaatgggctatcacctatgacctgtcttcttgaggtcaagagtcctattaatatttggggggagcatattaaagatgggaggaataaagaccaaaggatgtccatagaggtggaagcactagacagccgtctcgttcttggaccccaaggagggcaaatgttcatgaagtcagggtggccagggactgaggaggtccagcagacgggagtgggatgggcagaagatctagccactgggacttgatgatccctgagagagcagtgttggtaatgatgccgggatggggtgagcgtgagcatcagcagcgcagcaggaggaccttcctttgaggacatctatggtaaatggaaggaaagaaagtggacagtcactcccaggaaggcaggctgaaggaagcatcatttacgtggcagaaacttgagccaaagtttctaagccaaaggggaaatgccggagagagagagggagggcgggaaggagggagggagaaagaaggaatggggcacccgtggtaaggatgcccttccctctcagcttcaggaggaaggggaggggcacacaggagacctcacggtggcaggaaagctgaaaccccctccctggccagtctgcatcttcagagggtgacaccaggacgggcgggtattaggtatcttggctctgaattggaaccccctccctggccagtctgcatcttcagagggtgacaccaggacaggcgggtattaggtatcttggctctgaattggaaccccctccctggccagtctgcatcttcagagggtgacaccaggacgggcgggtattaggtatcttggctctgaattgggtatcttggagaagccaaagccttcacaggggccccaagaccctttagcacctgcctccccgccccattccctccctgacctcctccccctgccctccacccctccggagctctctagacccattgcactagctccctttccactctccaatttgccagacctctccatcctcaggccagttcctcttctttttccttccacccagcatgtcccaccccaggcatctgctcagagatcaccttggggaggccccctgccctggtgaccctatttgaacctgcaaacctccagtcccatccaggactgctgactcctgtccctgctgtttttcatggcactcatcccccttggagggacaaagatgtactcctgaactgatttttcagtctatctcaccaagctccaccacgggcagaatttcatctggtgttggctgctgtgcccctaccccagggtctggagccgtgcctggcactcagtgtgtacttggcatgggtgcctgcacgctgcgctcctggatgtggccacctaggaatctgcaggggagacaccgcaggaggacagagatgaagccttggagactgagaggggtggaactctttagccaggtgattggaagggtgacttccaaggccatcacaggtgttgggctgatggtatgtgacagtgcagagaagggccacaccacctcatgtcatcggctgaagagatccagcaggttgggggacctgagtgaaggtcaatgggacatcatcccaggtcccccagacagccccagctgaccccagagacttctcctggcctctggggaaaggattgtagagagggatagaaaataagagtatctaaaggttcaaagagaaaataactcatgtggtatatacatgcagccgggcagtcaggcagtaaattagcactcaccaccaagaagaaagggggagaatgagatacagggagagaaaagccaatcagcaccagcaatggctcctctgagatcagccgcttctgaaccatgggccccgcaccagcccagcatgggcaggagcaaagaaaagcacttgatgaaagaaacagaatgataaaccaaagggcggctttctttctatcaaaggccaatttccctctatggagggtcatggtccagtgactccagcgttgcaagagagaaaatgaagccgccgctttccctcaaagaaatatttaaagagccaaagccaggctttcctttggggtcttctttaagttgtgcgattctcagatcttttctaggaattatgttggttttattatctcatatattgtattgtctgcctgcagctctttaactgtctcataattctccccgccttggagtttaatcagtttagcctcttctctagagcactgggcaccttctgcgatattgtggtctatgaaacaaatgtggcccgctcctttcttctgagcctccccacttccaatcctccctccagaagtaaccagctcctggtggattcgctgccccttcgcaaatgcctgctacatcccagaccagggctgagcaccttgtttattttgtttaatcctaagtcaattctaattcctggatggtgaaactgaggcacagagatttgttaattttccccacctccccagttcaatgcagacttggttttgaacacaggactgagcagcttttccctgcggtgactgttaccctgggaggaagggcctgcagacatcagctccaatgctacccaagcaacatgtcactccacatgtgccagtaagctgctctcacaggcctgttattggctttcagagctcagataatgctctgttagatttttactcctggtatttggtggcatgctttaattagccctttatttagggatttgcttaaatcctgtaaaagtgggtcagagatttctgagcttatttcgcctctttctttgtaacattgcccaggcgatggcaggatggaggtgggtatcatgagagattactaacatttgttcatttcttgctatgcgccacgcacttaacgcctgttatcacatttaattcttacaatagccctctaaggtaagtggtattattcatgctttacaaacactgtaaaggagacttggagaggagacgggacctgctcagggctcacagatggcacatggcaggggcagaatgctggcccgccagcctcagagcacaggctggcgccctgatgccatccacggccagttgccacctcagtgtatcacttattgccctgtctccaaatcatatctgtagagatccactagactttgagacttcttggttctggaaaatcttttaatccagctaataaagctcttacgacacaagttattcctaactcacacttcattcctttaccatacaagcagttattttgttctgatgcataattaacattttgcacagcttctctgctgaccccagaggaggcctgagatgagcagggtcctataggtgggtgctgagctgggactcctgcccagcttttccctagcacctcctatgcccctgccaccctcagagggagagaccagggacaagggctgctgcttccttcctcccaggaagcatggctagggggggtctcaggaaacttacaatcatggcggaaggggaagcaggcacatcttccatagccagagcaagagagagagcagggaggtgctacacactttcaaacaaccagatctcatgagaactctgccacgagaatagcactaggcggatgatgctaaaccattcatgagaaactgctcccatgagccagtcacctcccaccaggccccacctccagcactggggattacatttcaacatgaaatgtgggtagggacacagatccaaactgtattataaactctggctacagtactgctattttaagaacttggggtgacatctgtataatagggtataatcacagcatcttcctgaaagcccaactttgagggctcagtgagtctggccataatgacttagcctgcctcagagggagcactccggaaagccttgtccattatttggcagttgtttcaattatctattgatgtgtaatcgccccagaacataatggcttaaaacaataatcacgttgggctgggcgtggtggctcacacgcgtaatcccagcactttgggaggccggggtgggaggatcacctgaggccaggagttcgagaccagcctggccaacatggtgaaaccccatctccactaaaaatacaaaaaattagctgggtgtggtggtgggcacctgtgtagtcccagctactcaggaggttgaggcaggagggtcacttgaacctgggaggtgggggctgtggtgagccaagatcatgccagtgctctccagcctgggcaacagcaagactctgtcaccaaataaataaagttaatgctgcgattcttggagccagggcctccatcaggacccggcaggtggactccttgctgctgcagggacatccctaccatggctctgctggggctggagggcccaaggtatcttccagctattggccaacgccacatgggttctcctctacctggtccttctttccatgcagccacttgtcactgagcttcttgacatggtgctggctactaaaaggccaaaaacagaagccacaggctgctgaagtctatacctggaactgaactgtgttacttccaacacgttctgcaggtcaaagacagtgaggaccaggcaagagggcccctgccttgtgttttagagcagagctgagcaaactttctctgccagggactagataaaaaataggcttttcctaaatcttaattttagatttttaccaagaggcaaaattgagcaactgttcttgccaaaatcattttacatttaaaaatgtaaaaagcatgcttagctcacaggctgtacaaaaactggatttggcctacaggctatggtttgttaagccctaccttagtgggctctcctctccccaccagtccccaggctgggctctccttatagggttagagtctgcagggccaatgcccactcacagcctgctctccgaccccttttagacaacaacctgggtactcagagcctggaattcccttccagggcctcttgccaagatccatccttcctgtgaacaccgccctgctggcgtatgcactcctgtggccagtggaggagtcagtggatggctgttttcaggggcagtgggacgcagttagacatgcaggttggggtgctatgatggaaagggcctgggaagagaagtggggtggcccatgtcaatagtacattcttaggcctccacatactggagtggaatctcaggggtccatgaattcttaagtcaaacttgtccttccaggttcttgggaaatgtaaaggactgaattgcatccccacgcccccaccccacaaatccgtgtgctaaagccctaatctccagtgtgactgttctgtagagataaggccttgaagaaggtaattaggggagaatgaactcatcaaggtggcgctctgatctgataggattagtgttcttacggggaggggaagaggccacaggagggtgcatatggaataaaagccacgtcaggacacagcgagaaggaggcagccagcacggcaccaagagaggcctcaccagaagcccacctgctggcaccttcatcctggacttccagcctccagacccaagagaaatttctgttgtttaagccacccagtctgtggtgttttataagggtagctcaagccaaccaatacaggaaggtacttgtgtcaaggggtgggaaagagcatactgtatttaaccgtctgttggcttgatttgtaatactcctatttagataaaggctgtgtgagtcttagttattcttgtcccggctccctcaccccacatgttagagatggcctcatcctaggtcaatagggagttgtgggttagggccaagtagattatgttataaagcgagatgtattttatatattcatatcttttttcatatatatgttcatatatatatgtatgtgtatgtattcatacaatcaacatcgttgtcactcttatcaagcagaacaggaaggaggaataaaggccccagagggcaggggcaccatctcagatgtctttgtcccattcacagctccttcttacacagagcgggcaccatgtgcgacagtaaagcaagagccaggatgaatcctggccccatctgccacctccccactgtgcgtgtgactctggtcacctcacttgagcttgctgtgcctcgacttctccagtggtaaacgagggtacgacctagcacggtgctggcttaaagactgtgctcaggggtggctctgattcacatttgatttatagtcaatattacattcttagtgcatctcaccattaaggaggttcctgaaaaactcggtgggggaaaagagaggatctgaagaggtgtttgatttctttgacgtaacaagaaattaaagaagtttgctgggcatggcgctggagaggtccggtgggccaagtcgattagatgatgtggggtgggccatgtcaatattacattcttaggcctccacatactggagtggaatctcaggggtccatgaattcttaagtcaaacttggccttccaggtccttgggaaatgctaaggacggaattgcacctgtcagatcagggccccaccttgatgagttcattctcccctaattacctccctcaaggccttacctctacagaacagtcacactgggggttagggcttcagcacacggatttggcggcgggggatgcaattccaaggtcgggtgacccaactcaattagataatgtttttctagacccagtcgctccacagtcaccttcccgatttctgccaggatcagctagccttaccgaagagctaaaaagagattcatcccaaacaagagcttccttggaagcattccatgaagacttgaaacggtgctgcctcccaccacctgacccagtattgtcagtgcctcctctgaggatcgcagaaaatcgcaccccacgcccccccagtgcacattccagacttggagaagcgcggcatggggtggcggtggggagaacacctttctgccagatcaaaagcccagcactttattcagagttttatttatggctccttcagaaggttagtccagtcacgcctccttaataaccgcctcatcacacatgattcaggtgtcctggggccacttcacgctcctggcttcctggcccaaagcccaggagaccgctgaaccccactgcctggcattatttgcgggcgagacaccactggtgaagtgtttgtcttttcttatggcttattttattgaaggttgttcttttagtcaaacaccttttcagttctttgtgtttgctgagcacccagggctgtctcacccagccttgaattgtttccaggcaccttgcaagccagtattgtacagttcttttctgcacagaaaaagtacagacttctggtttccagtccagcatgttaggagcttagacgtcatcgttccatcctgacaagtgaaaagctggactggaaaatcaacaattcttcctagagccattggcgcctcccacgtgggagacctgggttcatttcctgaccagtgcaccagcattggtggttgagtggtagaattctcgcctccctagagccattggaaaaatgaggtaacagggcaaaccactgtccccaaaattagacagacaggcagatacagataattacaacttaccagaacagaaacctccctggctactagtgctggggtgcaaaaacctgatccgtaatcggcaaattgctggaggctaagtgtggacaagtctgagaatcagtcacgggggctccacgcgttttggagttttccctcaggaagcgctgccgggtcctcacagtgaatgctggagaaaaatcgcctcatgcttctggcagggagaggagaaaagtaataaccattgtgaaatatgccagagcatcccgttcttcttaacaagggcttccctcaggagacgctaatgtgagcttaatctcctggggttttatcagaccctaacctacctagaagaagggacatccccgattccaatcccttccacccatcctctcccacccaagaggagaggggggagaccaagaagcacttgtgaaggtcacaatccacaggcacaggctccccacaagacagagacctcatcgtcggaccgtagcacacttcccctctccacacctcaccaccacatcactaaaggttcatgtactacagttcctttcacccagtgtgccatgtccagccctcaagaaaacaattacagcacactaaatggcaaaaaaaaaagaaagcaatttgaagagatgaagcaagcatcagatgcagactcaaatgtggcaaggatgttggaatgataaccaggagttttgttttttggtttttgggtttttttttgttttggagatggagtcttgctctgtcacccaggctggagtccagtagcatgatctcagctcactgcaacctccgcctcctgggttcaagcgagtctccggcctcagcttcccaagtagctgggattacaggcatgagccaccatgcccagctaattttttgtatttttagtagagacagggtttcaccatgttgcccaggctggtcttgaactcctgacctcaagtgttccgcctgcctcagtctcccagagtgctgggattacaggcgtgagccaccgtgcctggccataaccaggaatttttttaaactatgattaatttgctaagggctttagtggaaaaaagtagacagcatgcaagaacagatgggcagtgttaagcagagagaaattccaagaaagaaaagatgctagagatcggaaatactggagcagaaatgaagaatgcctttgatgggctcatctgtagactggacacagctgagtctggggtgactgagcctgaggatatggcagtaaaaacttccaaaacggaaaagcaaagactgaaaaaaaaaaaaaaatggaacagactatccaagaactgtgggacagctacaaaagatatatgccctgggaacactggaaggagacgtaagagagaaagaaacaaggaatgtttgaagcaattgggacagagaatgtcccctgaattaatgtcagacaccaaatcacagatccaggaagctcaaatgacacaaagtaggacaaatgctcaaacaaaacaaaaagctaggcatatcatattcaaactgcagaaaatcaaagaattctgagggaagcccagagcggggaaagcaacacgttacctaaagaagggcaaagacagtagagtgaaatatttaaagctttgggaggaaaaaaaaaaaaaaaaaaacgaacctagaattgtgtaccctgcaaaattgtccttcaaaagggaaggagaaataaagactttctcagacaaaaacaaaggaaatgtgttgccagtagaccagcctggcaagaaatgttaaaagaattttttttgttttttgggtttttcttgagatgtagtcttgctctgtcccccaggctggagtgcagtggcgccatctcggctcactgcaagctccgcctcccaggttcataccattctcctgcctcagcctctcgagtagctgggactacaggtgcccaccaccatgcctggctaatgtttttgtatttttagtaaagacagggtttcactgtgttagccaggatggtctcgatctcctgacctcgtgatccacccgcatcagccttccaaagtgctgggattacaggcgtgagccactgcgcccggccaaaagaagttctttagagagaaggaaagtgacataggtcagaaacttggatctccatggggcaaggaagggcaggctttgcagatgctgccaccacccatagccccctgcaccagccgtgggcagccccactgtgttcttcaacatgaggccgcatctctttcaagctgtttgcagactacattccaaaaacagcagaaaatttttgtgctctgagcactggagagaaatgatttggttataagggctctttgctttcacagaatcatgccagggtttgtgtgtcagagtggttacttcacacaccatcaaatttccaagaaaatttactggtatcaagaaagaaatttgatctacgggaagaaatttgatggtgagcacttcatcctgaagcatacaggtcctggcatcttgtccatggcaaatgttagacacaatacagatggtccccagtttctcatctgcactgccaaggctgagtggttgaatggcagagtggcatgcatgtggtctttggcaaggtgaagagaatatcgtggaaaccatggagcactttgggtccaagaatgccaaggccagcaagaagctcatcattgctgactgtggacgactcttaataaatttgactcatgttctatcttaaccaccagacattccttccttagctcaggagagcacccctccaccccattcgctcgcagtagcctctcatctttgtgctcttgctgcagttccttgggttccatattttccttattcccttccatgcctagctgaattgcagagttaagtttatgattatgaaataaaaactaacaagagcatcagagaaggtataggtgaaagtaaaatacttttagtattcttgatctaacatgagtttttttcaaaataataacatattctagtgtgtgtgcatatcctatgtataagtgaaatgaacgagagcagtgatagaagggataagagggaagaattaggattattttgttatcatagctactttcactatgcatgaagtgttacagtgttatttgaaagtagacttgggctgggcgtggtggctcatgcctgtaatcctagcactttgggaggccgaggcgggcggattacaaggtcaggagattgagaccatcctggctaacaaggtgaaaccccatctctaataaaaatacaaaaaaaattagccgggcgtggtggcgggcacctgtagtcccaggtactcgggaggctgaggcaggagaatggcgtgaacccgggaggcagagcttgcagtgagccaagatggcgccactgcactccagcctgggtgacagagcgagactccgtctcaaaaaaaaaaaaagaaagtagacttggtttcgttgtaaatatatattgcatattctagggcaaccactaagaaaaggaaaaaaggaagtcactgatatgctaagaaaagaaacaatggaatcatatgaaatgctcagctaaacccgcaagaggcagaaaaagagtgggagacaaaaaaaaaaaaatggacaagggccacaaatagaagacaataacaaatatagcagtgattaatccagttatatcacaaataactttcaaagtcattggtctaaatgcagcaattagaagattgccagactagatcaaaaaacaagacttaactctatgcaagaaatccactttaagtataaagacatgtagattaaaagtaagtggatataaaagatatatcatgctaatactaatcaaagaaattaggagtcactatattaattgcagctagagcagacctcagagcaaggagagttatcatggaagggcattacataatgataaaggggtcaagtctccaagaaaacatagcagttgttaatgtgtgcgtctgacagcagagcattgaaatacatacggccaaacatgatagaactgcaggtagaaatacatgaatccactattttatttgaaggcttcagtgcccctctatcagaaatagacatatcccgcaaggagagaatcagtagggacggagttgaactcagcaatactgtcctgtagactctacttcatccaacaacagcagaataacatacattcttcacaagctcacatagaacattcaccaatatagaccacattctgtgctgtaaaacacaccttaacaaactgaaaataatagaaaccatgcagtgtcttctctcagaccacaatagacctaaactaaaaatcaataacaaagatagctagaaaattccaaaatacttgaagattaaagaacccttctaaatagtgtgggtctaagaagaaatctaaaaggaaattttaaaatattgttaaataaatgaaaacgtagatacgacttatcaaatgttatacggtgcaattaaagcagggcttaggaaacttatagtattgaattcatatattagaaaagaagaaagatctaaaatcaaccacctaagcttccatcttaggaagctagagaaagaagagcaaattaaatccacagtcagcaaaagaaaataaaaactagagcagaagccaatgaaatagaaaatagaaaacagggaaagtcaacaaacccaaaaggaagttctttgaaaacatcaataaaattgataagcctcaagtcaaattaagaaaaagagagagcacaagttactaataaatgaaagaggacatcactacagatcccatggatgttaaaggatgataaacaaacaccagcatggaaaactacagactaatacctctcatgaacatagatgcaaaaatcctcaacaaaatattagcaagttgaatccaacatgtatagtaggaattagcttctgtttgcagccagtataaacaattgcaaacactgctttcatttgatcctcttctgaccttttttgggaggggtacttaggctgttctgctgtttgcttcccattcttacagggaggtaaaaaagggtggctactctaaatagattttaaagcactttcattggtgtaattactattagagagatcattttctgttttctccaattgtacatagagccacaatttttgtctaaatagaaaatacataggctgggcgcagtggctcacacctgtaatcccaacactttgggaggccgaggtgggcggatcacaaggtcaggagattgagaccatcctggccaacatggtgaaactcagtctctactaaaaatacaaaaattagccgggtgtggtggcgtgtgcctgtggtcctagctactcaggagcctgaggcaggagaatcacttgaactcgggaggcagaggttgcagtgagccaagatcacgccactgcactccagcctggtgacagagcaagactccgtctcaaaaaaaaaaaaagatacatagtttggactctagactctttgtttttaatcttgtggtaattttctttatttttctttacttatttatttggcggtggttgttgttgagatggagtctcgctctgttgcccaggctaaagtgcagtggcacgatcttggctcactgcaacctctacctcccaggttcaagcaattctcatgccccagcctcccgagcagctgggattacaggcacttaccaccacacccggctaatttttggacaggctggtcttgaactcctgacctcaagtaatctgcccacctcggcctcccaaagtgctgggattacaaatgtgagccactgtgcccggccagttttcttttttttttatataatgcactttgtccaaggatttcaaatattgtagtcatttcccatgtgacatagtaagatccttgatcttggatatcgtatcttagcgtatttgtctgttatcccagttagtttggtaatctgtgatacctagcagagtgcccaacccatagaaatgtacagtcagccatactcagtgggagtgagcaaaggagagggccaaggagggtgtcctaataccataagaaaacagagaagcctgaagttttgctgctccagtaaaaaatcaatttaattgcctaaggggagatttttaaaaatctgtttgattcacttctgtaactgattcacttctgatttactatgtctggtacacagtaaattaatatttgctgaaagaacgaatggaaggtttattgtcgcttaagaattttcaggtgccaacaatcatttgagtgtttaacatataccaaaatgtttcctctgtccccctctgagccaagtttagtttatttccttgaataactttcacccacctgcttatttctggtaggccagttcttatttctaatgttaggcagtatggagttatgtatactcagctgcagtaagcacattttaatacacataatgccatttaatccccaccacctgcttgtcaggtgggtgctgaaatcccaagatcacagctgaggaaatggaggctcagagaggctaaccaacttgcccaaagtcacacagctcctggcctccagcagttgggttcggagctctctcacctcattctgcttcccgcttgtattctgagctttggctatgccattggaaaggagtttaattaggaagtatctcgattgagagctgggggtgtttcacttctcccctgctgcggggctttctgtttatgacgctctggtctctgttctgatgctttagaaagaggacacggtcaggagacctgaggcctctctcttcctgaccttgctgttaaccagcccaatgacctcagcaagccactgtgccactttgagcctcaggagcctcttcagaaccctgaaaacaccttttttattttattttaatttgttttagacggagtctcactctcttacccaggccggagtgcagtgcatcatggctccctgcaacctctacctcccgggttcaagcgattctcctgcctcagcctcccaagtagctggaatcacaggcatgtgccaccacgtccagctgatttttgtatttttagtagagacagagtttcaccatgttggccaggctggtcttgaactcctgacctcaagtgatcctatcgccttggcctcccaaagtgctgggattacaggcatgagccactgtgcccagcttgaaaacatttttctaaatcatccctccagacttagcaatccagcaattctaacagcccttttgattttgcactttagaggtaggcagtgtctatggagtggtcttggatcagatccactacttctccaacacaaccttgtgtctgccccgtgcctgaggtcctggtgctgggtacagaagtggatggcccagccccaaccagggagaagtctgggttgagtaggggcagacagtctcagtagacatgacaaaggctccaggagttgtgggtcccacagtagcaagtggaggagacagttatcaaacccaagatcccagctgtcagatcagaacacccagaaaacgttcaggcctgtcttctttctttccaaatggtgctgtttggacgcgtcagacagtgctttgaccatgttacatgtaaagagtgcctctggggtcctgtgttctatccttgggaatggatgatgtttttcaaaacaaatgtaatttttccatcaaaatgtttttgttttttgaaaaagaaaggatattctttgtttccctgaaacagtaaaaggacttgagtgtgttttatgcataaaggccaccgttattttgtaatgacagcttgggaagaggcttttgtggccaggccttttatttaagattgggctctaggggtttgctgtatacatacagcacaaaaatgaagagtgaaatcccagttcaagtgcagccgagaacaggagagtgaatctccacacacgtactttataggtccgtgggttccttcaagaaaaagcctttagagccaagagctcctgagtgaaggaggcatcttggctgttttgatcctgttaagcatttgggccccttttcagcaggactcatgtaaactgggcgagtacccaccatagctgtctagggaaccccactggatcaaggccttcagtatagaaaaagggtcagaagtatggatgccaaagccgatgaccagggttctaatccaagcgttgctgcttgcaagctctgtaacattggacaagctactgtgtctctctgtaccttatttcctcacctttgcaatgggccttatgaggattaggtgagcttcagagctaaagagcctggctctcggcacatgcctactgtggtgatgttggttacagctactgtcaatattgccagtggcatctaaaaccttcctgtgccgtcctcaagctctcccaggctggagatttcagaagttagaaagctcctggagtcccatcctctctgggaggcatttgaatgtgaagccctggtagagagtggaaggctgggtggccttggagtgacatccttccagctgctgcaggcccttggccttgtacaagacaagaagctaccccctggtccctttcatgccctggtcctgtgcccgggctggaagaaagctcattcatatctcacttttacaagacaggcagccatttgtaacatcctgacattcccccaagcagttggctcttgtaagtataataataatgatctaaatgacaaatagcagtaaaattgaatgacagtggccttgttgggggtctgtctttgaagccacagctcaacctcccatgtgcagcagggaaatccgccagctctagcccttcttgccaactctgcctctccttttgtgagtttctccattatgggaaaccagattggcgtcacagccccttgcctggggcttcaggatatcaggcagccctgggcttggctgtaagcccacattggcccacaagtgccagagacacctgctcctatccccataggggacagacaagagagtctcctcatccattccatggtctctgagcctggtcctcagcccaaagctggctccctagaccaatgagagccagagaaccagaatgggccataggagccggtggaattcagagggtctcagccagcactgtccaacaaaagtaaaatacaagccgaaactgcgtttagcagccaagtttttaacaagttggaaaggaaacagatgaagttaatttattaataaaaacatttaatgaaggccaggcatggtggctcacgcctgtaatcccagcgctttgggaggccgaggcaggcagatcacctgagatcaggagttcaagaccatcctggccaacatggtgaaaccccatctctacaaaaatataaaaattagccaggcataatgatgggtgcctataatcccagctactcgggagactgaggcgggagaatcgcttgaacctgggaggcagaggttgcagtgagccgagatcgtgtcatcgtgtcactgcattccggcctggtcgacagagcaagactttgtctatatatatatatatatatatatatatatatatatatccatatatatacatatttgtccatatatatatatttgtctttatatatatatgtctttatatttgtctttatatatatatgtctttatatatatatgtctttatatatatatatatatgagctattttgcattttttatactaagtcttcaaaatatgatgtggatttcacacctacagcacatctcagtttggactagccacatttcatctgctcagaaaccacaagtggccagtggccactgtattggatagtggctctagacagctgaatagggacagtatagccaacatcctaagtcgtgtgtatctgaatgtttatcttccagtggggctctctaacactattttcccttttacagtgaggctttggttaaccagaggtatttattaaccacaactgctcattgagagaaagatatgctttattccaaaaatgaatttgcagcggtgaggttgtgccctatacctgtaactgagatcttcaggacctcccgtgttatctggtacacaacaagccaaaggtgacacgtttctctgggaaaaaatgctctggctagattctaaaccccatcctattgttacaattgaaggcactgcagtgttcagagtgactttgtaatcttggcccagtggctgagcaggcgggctctatgcggctgatgaggatgagtgctgtcacgagaaaaacgagccttggcgcttggcattctgcttttggtaagccttggaggaaggagagcgtgttatcagaaggagtcatgggaatttaatgccttggaaatagaaaatgaagagccagctgggagccaacttgttgtagaacttaaagcaaaaccaatcaggtggccatggcctttaggattcatgaatccttctgaccagaaacagggctcccacacccttgcctgttgatggctttccaattcggacatcagtttccatcacccaagcagagagatgtggttggcaagactgctcagatatttgtagaatataggataggaaacaaagtataacctcctttgttcagccctcactgatcctttacctgatacacacagcaacactgttgcttcagccctgccactgttaaaaacaaactcactttgggaggccaaggcaggtggatcacctgaggtcaggagttcgagaccagtctgggcaacatggcaaaaccctgtctctactaaaaatacaaaaattagctgggcatggtggtgggagtctataattccagctactcaggaggctggggcagaagaattgcttgaacccgggaggcagaggttgcagtgagcagagattgcaccattgcactccagcctgggtaacaaaagcgaaactccttctcaaaaaaaaaaaaaaaaaaatttaatgaaacaccaagtaacataacatacacagatggtggggactggctttaaccaagttaaacatagtttaacatagttacaagagcaaattttattcaagtgcttttgaaatatagttacttaaaacaactgaaatgatgctttccaataaatcatcttaatcctctgggccctttgattaatatttcattaatcccagtatcaatgtatttgaaaatacattgaaaagataaaattatatctttaaaataaatgtgtcagtattcagttccacatattaattgattggctttgagcaagtctttaaacttagagaacctattttctccctataaaatgagaatatacagtaagacctcacttaacattatcgataggttcttggaaactgtgacttcaagtgaaatgatgtataacaaaactaggtttttctccctcatcagcattataaggaaatgatgttatttgaggacctgctgtatgttgttttgcttaaaatcacagtttccaagaacttactgctggtacggagtgaagacggactgtaataacaactctgcatcatcagattacacaagatgtgtgtagtgggtacaacctgcatttggtgcccagaaggtggattttcactcacccaaagagaatttctgttgcccttctacttggtcaggacaggatttgtagaaaagctgagattgtgtgattcacttacatgaaggaggaagtttttagaatggacaactcttgctgccacagcaatccctgaaatctcagtggcttaacacaaccaatatttccttactgctcacacacagtctgatgcaaatcaggcaaccctcctccatcttgcaactgagccatctggaacaggtggcccctagaatcacagtgacaggaggcaaatgggcttttaattgcctcaacccaaaagggcaacatcacttcctctccctgtccattggccagaactagtcatgtggctccaaagcagaggagattatgaaatgtaggggagcacatgggctgtttggggaatactatctgatgctgaaggtttgctcctatcattctaatttattctctgatatggcaatatgatagcctattaagcgtcttcccactgacttgttttgttttgttttgagatgaagtcttactctgttgcccagtctagagtacagtggcacaatctcagctcgctgtaaactctgcctcccattttcctgcctcagcctcctgagtagctgggattacaggtgtgtgccaccggacccagctaatttttgtatttttagtagagacagagtttcaccatgttggccactccggtcccaaactcctgacctcaagtgatccgcccgcctgggccgcccaaagtgctgggattacaagcgtgagccaccatgcccagccatttttttttttttttttgggggggagagattagggtcttgctatgttgcccaagctggtctccaattcctggactcaagtgatcctcttgcctcggcctcccgagctactgggattacaggcatgagccactgtgcctttcccctattcatttttaagtttgctttctggggtaggtttatctttatcattaacctaggttttacaccactggaattgaagtgaaattatccccccactgcaattagtccattttcacactgctataaagaactacctgatactgggtaatttccgaagtaaagaagcttaacaagaagcatgactaggaggtctcaggaaacttacaatcatggcggaaggcagaggggaagtaagcatgtcttaccatggcggagcaggggagagagagagagacaacaaggcgggaagcgccaaacacttttaaaccatcagatcttgtgagaattcactcactatcatggagaacagcaaggggaaatccgcccccatgagccaatcacctccctccaggaccttcccccaacaggtggggattgcaatttgagatgagatttgggtggggacacgatatggtttatggacacaaaccatattgggaggtaagtagtggctttcaggagttggccgagcagttttaatggatttttttcctttgcttaagggtgtaggttaagtgtactaagcatgtgctaagtggagaatggataagcagacttgatactgccactattctcaaggaaatggctttgtttttgttagtttgaaatgagaatccagtgtataaatcagctcttgatcttttagactgacgggctgtggaagggacaactcatttcagttaaaataggcatttccaggctgggcatagtggctgatacctgtaatcccaacacacctatgcaacaaagcaaaatcctgtctctaaaaaaattgttaaaaaattatctgggtgtggtggtgcatgcctgtggtcccagctacttaggaggctgggtgggaggattgcttgagcccaggagttgaggctgcattgagctatgattatgccactgccttccagcctgggcagcagagcaagacactgtctcaaaaaaaaaaaaaaatagtattgccaaatagccagtatgaatcagatcttaattttcctgtgtttaatactttgctttggattgaactgttagagaagtacttcagtagctagctgctgagttacaaatatgttgatttttttcctatgcatttatcctttaacattctagtcccccaggaccatcttgagaacagtgtggcctgctgcacaagcttttctcccttgcaaattttgttggggaaagccacatttcccacctagcatcacagagtgtgtttttctttaattttataatttgcagctctacaaagactgtgttgataggagcaaggtgtgtgagacaataattatgtttgtggaaccttgtcacattttcttagactattattttagagaacagccctaagccaagacattgggtcttgtgatccttttcaaagaaaatcgttgggctcgttaatcctttgattcaagtcttttttaaaatgatattttccattttgactaattgaagatttcccactaagataaatggaagagacttatcatttgatcaaaattatagcagtgcttgatgtttgcctactaccctacagttttcaaacaaaatccatttacattcactcatttaattatccccctggtttttctggataagcagagtttcccatgggtggaatgcttccattcttgggaatactttatatttcctctcagatttatacatttctagttggcacagcttctgccgttcagatgcaggaaatagagaatgccactagagaaacagatggaaagacaagaagcagatccaagtatgtgtaagttcatttgttcattcatgcatccagtcacttatctatttattcattattcattaaacaaagttattaaatatactatggcagtgtctcccataggaggtaatatgataggatgtttaaaagtagaatgctggagtaggaaatcttccatgtaaacatttgttcagacacttgctaattttaagtttttcacaattttttaatctaggcaattgggaaattatatagtcaatctgtctttatatggtatagcagttctgtgttttctgttctaacttcaaaaaaacaaacggaaacagaattgcccagtgattacaatggcaccagcctagatcagccagcatttagctgactcccagatgtgtaagcacccagccaagatcagcaatgccccctgactggccccctttaaagacttaaacgtagtcctaaaattaatatagcaccttctttctgatccaggtagaagtacgtgtctaaatgtttctagccctatggtagtgtctgccacggcagcagtagcaatgggagcagctgtgttaaggaagagtgagggttccaacttttctgctgatctgggaagtagtggatgtggagggttgcagtgtcagagaaaaagcagccagtagacctaggtctcttggtgaaggcgatgagtttgaggagttccttgccaaaggctgggctggcttagatgaagatgcacgtgtctgggaagataactgggataatcttaaggccagaagtttgagaatttggaaaacgggcacttgtttactggtgggagtgagcgtgctactgttttgagtaacctggcaatgtgtctttttttttttttttgagacagcatctcactctgtcgcccaggctggagtgcagtgggggcgatcttggctcactatactctgcctcatgggttgaagcaactctcctgcctcagcctcccgagtagctgggattacaggcatgcaccaccacacctggctaccttttttgtatttttagtagaaacggggtttcaccatgttggccaggctggcctcaacctcctgacctgaagtaatccacccacctcggcttcccaaagttctggaattacaggcgtgagccactgcccctggccagcaatgtgtcttaaaaagttttacttttgagttagaagcatttattttgacccaccaattctattgacaggaatttattttgcagaaatagtcaaaggtcttgccaagatactcatgatatattattaaataaacaaactgaccacaaaatagcaggctcacataattcagtttttaatgcatatgtacacacatatcacacctagaaaaaaatatggaaaggttttatatggaaataacattaatatttctggatagtgatcataaacaattttacttccttatttctttttttttattttttttgagacggagtctcgctctcttgcccaggctagagtgcagtggtatgcagtcttggctcattgcaacctccacctcccgggttcaagcgattctcctacctcagcctcccaagtagctgggactacaggcaggcatcaccatgcccagctaatttttgtatttatagtagagacagggttttaccatgttgtccaggatggtctccatctcttgaccctcatgatccacccgccttggcctcccaaagtgctgggattacaggcatgagccaccacgcccgccgcttccttatttctttagcttttcattttcttcctaattgttctttaatgagcatgcatggcttctggaattttttttaaaagcacaaaaagattatttttaacagaatggttttacctggtaatggaaaatataatgacattggtatcagggagataaattcagtccagtccttttgggagagcaatttaccattgtatcaaaggttataaaaatatgcaactcctttgatgcaaaattttgtctgggaactggaatgagatgtatcatccccgggtaatagactggagactcatttcttggggtttcttatgtgtgtattttccaagttttcagaaaagaatgtgcagaacaaaggttgtaaaagaaattagagactccttgtaggttcctatgtttatatcattttcttgtcaaggaaatgagctacaaaggtgccagatctaatcttgtttacccttgttactgcccacacttaaactgttggtgcttgtgtttctcatcctacatgcagaaatattagtaatacattaaagaaatgaaagtgggcagacatgcagaaagttttatgtccgaggacatttaattagacattctgggccattaaaaaaaaaaaatcccagaacatttcaaagtaaaagttgtaagcgaaatggcagaatggttatgctgagtacctgttagtgtgtcttgaccttgaatcctggcatgtgatccatgggtctgggaattgtgtgcagcaggtacacagcgtacctgagaggtaatgaagccagtgttttaataagccctgccatacttagaaattcaaatccatgttactcccttccacgaagggaggttatagaattattctagtacttctgatagccacaaaggtagaaggaagtgtagaatgagctccctgtggacccatcaccaatttcaacagctgccagcatttgccaactcatttcatttatttttctcccacctcatttattgaagtgtttttttttaatttaagatatgtcagttcacccataaatactttatctcttttctatttcacccataaatatactcatttctaactgataagcacactttaaaaatgttttaatagtattattactttttaagagacagagtcttgctacgttgcccaggctagcctcaaactcctgggctcaagtgatcctcctgcctcagcctcccaagtagctgggactccagactcacaccaccacacccagccagaaaacatgttttctaactagtcaacataccattatgccacctaacaaaatgaatggtaagtcctcagtatcatctgacatccagattgtatcttaattttcccagttgtttcaaattttctttgttgcagttggctctagatactatatttgcttactatattttatgtcttttaaaaagtgttttaaaacttctgtttttcaatagactgaatgtatatcattgcacttctctgtgcaacacaagaaaactataatgtttccttatcatcatccttactattatactcttagtaaagccctgttacatagtttgatcatcttatatgtcagactcaaactctgaatgacctctggcttttcctttttttttttttttttttaattaaaaaaattttttttaatagagacaggatcttactatgtcacccaagctggtttcaaactcctggactcaagcaatcttcctgcctcagcctcccaaagtgctgggattagaggtgtgagctgctgcacccggcctctggctttttctcaaaattaaatccacctcagtgtccacatactttctgccagggaggataattaaaactaccttcagacagtgctgtggcatctccaggtggattcagaacaagattccccaaaccagccgtgggcagtgaatcacggggtgatagttctccgtgtgtctgatttgaagggtcctcttcccttggcgtaacatcaaagacagatcttagcacctcatctgcatgaactgagtgtataaatgcctacctgcttgacttacctgttctgacaggggctattggacttaccactaatgtaattgatgtgtttgttttcacacagataatcgcttatcagccgtatggaaaatctgtggactggtgggcctatggcgtcctgttgtatgaaatgcttgccgggcaggtaatgttttgctacattttcatgtttgtttattgctgtgttatgtgaatacttcagctctggttgggcctcgagagcaagacctgacgttttagtgcagctggtgttggcgtgacttccctgacccaggcgaaagagggagaaacgcccccttcaaagtggatcacgttcagtatgcacagaaattatctctggtcatagaaactccaaattgaaagctacaacctggagtgtagacagtgtcagtttcacgttatgaaatgtacatgttggccaggcgcggtggctcatggctataatcccagcactttcagaagccaaggcaggcggatcgcctgaggtcaggagttcgagaccaccctggccaacatggcgaaaccccatctctactaaaaatacaaaaattagccaggcgtggtggtgcacatctgtaaactcagctacttgagctactgaggcatgagaattgcttaagcctgagaggcggaggctgcagtgagccaagatcgtgccactgcactgcagcctgggcaacagagtgagacggtctcaaaaaagaaaaaaatgtgcacgttgatgacagcagtggcctctaagttttcagtatcttaaaactggggttgggttatatggttccctgcaagtttgtctgcaaagattgccccagctgctgccaatgtgtgtaattagtattattatttaaggaagaagacagttaccttgaagaagtgttttaatagtttctccccatctcctcctatctcacccttggcaattcgttgtaattttcactgaagtccagtgaggctgaacatccagttaaggaaggtaaattagctttctcttatgatgtgacatgtaccagataaccatgtgccttattgcctaacatggcactttctaatataatggccttaatatctgtgtcatcagggtgaatcgtactatctgccacttctaggcctggcccctaagacatcctttatgactgtcctcatgctctaggctgaaattaggaggaattagtggagaaatctgagaccctacaagatggtggtgctgatggatgcgagaagcctgagtctttgaatgaccctgtggtcagtgcccacccccacataggacacttccgtggcaaagtcccatgtgggggtggggcactgacccacaggttcattcaaggacacaggtttctcctgtccgtcagccctactaccttttagggtctcagatttctccgctaattcctcctcctttcagccgagcacagatcagttacataggatatcttaggggccggcctagaaatggcatgtatcacttctgcctaggttccactggccacttggccccagtgggacacaaagaggcaggaagtatagcatatctgagagctcagcaggggaagcaggcttggtaatcacgaagcaggcttggtaatcacccagcagatctctgccttatactaaacatgattctgccgtgggcagctttttataattcccagcactcacatgctagtgccaagacctgtgactctccatagccagaagccttagtcagagacaatggaaagagatggccatgctgtgcgacagagccacccccaaagacatctttgtttctggggaaaaagtcttcccttcccacatgttacgtccattgactcatttattcattcactcaccacgtatttattcactgaatgcttacaatgtgcatggccataaggatgaacaaaacagacgagaatccttaacttcgtgaagcttacagcttagaggaggagagacagcagacaggttagataaggaaaatgtataacacagcagaggtaagctaggaagaaaagtaataaagcaggaaagaagatagtgttgggggaggttgaaattggccagagaggataaggttaagacctaaaggaagtatggggttgtctgtgtgcatatctgttgaaagggcattccaggcagagggagccaccacgcgaaggccctaaggccagggaatgtgcagccacgtttaagaaatggaagctcccagcagggctagagcagaattgagctagagagggagggagtaggaggcctgaggccagagaggaagaggctctggatcctgttgttagcagtggtgcatccccatgaggctgcagcaacctcagttcttgcctcctcagaagaaagaatttgactgtggggcatcaggtagagtgagagcctaagacaagctgtttctgttttgttttgttttgtttttgagatggagttttgctctgttgcccaggctggagtcggtggcgcgatctcagctcactgcaccctccgcctcccaggttcaagcaattttctgcctcagcctccttagtagctgggattacaggcacctgccaacacgcttggctaatttttgtatttttagtaaagacggggtttcaccatcttggccaggctggtcctgagctcctgacctcgtgatccacccgcctcagcctcccaaagtgctgggattacaggcatgagccactgcacctggcctaagacaagttttagagaggaatgaaagttcatggaaaagctttcaagcaggagcaaaaggaagtaaagtacacttggaagagggccaagccggcgacttgagagatctagtgcactctttgacttttgacttggggttttatgcattggtgttcttccagggtcttacatctcttctcccctgattcttcccttgggttgggctgtctgcgtgcgcagtggcctgctagtgcttgggaggggcggcatgtgcagtgtgtttactggagttacgtgtgtgctcagctgaggcattcttcccttaccagtcagatgtcctagaaggtggtgtaccagttaaactccgccatgttgccttttcatgcgcgtgcttgagcccactcgcccaactcctgaaatcttattgggaagctgctgctcaccagtttcaggtgtttccctttattgggagactgcctttccttggtgctggctgcgaccaattattattttacagagagagagttaaccacctgatggtcgcctgacattcctggtgggtagggggagccctctcctgccctgcccatgtccgaacagccacctgttgtaacactgtgaccatgaacgtcatctccagatcagcggctttgcctctaggatgggaggctgtggatgatctctcctttatgtgtctttcattatatttcctaaatactgaaatggtcttgtagacattgaaagacataaagctttagcctgcatttgatcattatttctcaatggtgttaaggcttgactgacatcaaaagagtggtttattatttatttagttcccctccccccaccccaaatcaaagcattcctcttaggccaaatacgtccgggtgtaaacacagaaaggcagttcgtacacagtcaccatcagtgagtcaatggctggagaaacaggagttgtctgctcctcaagttaatttccccctctttaaaatttttacagtaaaattcggctctgaattacaggccccctaagagtcctgcttttcatgaagtcacaaaaagccaagtccccctcttgatcccacttgaatgttcagctcttgagtctggaaaacaaaccctgctttcattaagagtcacatttgcatatgctaacatgcaaaaggggctgggcggaaacgaagccaggatctgtttccgagggcgctttacaagaggtcacgtgagtagactcttggccagcaggagacaagaatttcagaacccaggtctgcaggaaagtcctcctccctcccgcagcctggcttctcccctctccaagccttcctgggatctcattcactaggggagaactcagggaatgctttcttctggcagagaagtcccctttggggggtgcattttgaagctctgccacactggcctcagacctcatttgcaaattggcctgaggtgatttacaggccttatttaaaggtttccctactaagctcacgccccctggagagcaccaggctccagctctcaatagttctgcaaactttctggcctgtttccaatatttcccacactgcttctcagagccacttagcctgccttatatgcatactttcaggtctccatcatctctattaaaaacggtgatggctgggcccggtggctcacacctgtaatcccagcacttcgggaggccgaggcgggcggatcacgaggtcaggagattgagaccatcctggctaacacagtgaaaccccatctctactaaaaatgcaaaaaaaaattagccgagtgtggtggcgggcgcctgtagtcccagctactcgggaggctgaggcaggagaatggcgtgaacccgggaggcggagcttgcagtgagccgagatcgcgccactgcactgcagcctgggcgacagagcgagactccatctcaaaaaaataaaagaaaaaaagaaaacggtgatattctttaaagatgacaccttagaccaggtgcagtggctcatccctttggggcccttgggaggccaaggtgggtggatcacttgagtccaggagttcgagaccagggcaacatgacaaaatcccgtctacaaaagatgcaaaaatgagctgggcgtggtggcaagtgcctgtcatcccagctacgtaggaggctgaggtgggaggattgatcgagcccggggggtcaaggctagcagtgagctgtgatcatcacaccactgcactccagcctgggtgagagagtgagaccctgtctccaaaaaaaaaaaaaaaaacaacaactccttaaaggcactccacattctggtgcaatggcaggcacagataacagcctttgttcctctaaatctccacctcacccgcctcaaacacagtgttttcattcaaatccccttcttcatctttctctctgactcctcaatgcaaatttaaatgtattcctaggctgtcactcagctcagaaaggataatgaaggctctacccagtattatccacagcccctccaagcttcagcaatcccagagacccagcaaacggaatagatgttgttattgaaaagtaagattaatgataaagtcgttgacagggttttggtctaagtttgtcctctttaatcgcagagggctgaagatgagcaggaaaaaaatagtttattgccattttcttctcatttgctttatttattgtcagcagccaagggggcagttaagaataaacagcctcagtctttattcagttcctggactgcttgacaaatacaatcacttttggggcataaatagtgtttacccagcactctaatgagcaccttgtgcctgcaagtgttctcggtgatcgtcataaagggaccagccctctccttatgcccttttctccctgggttatttatgctttgatttcactcctactgaatcagtaatcgccacttcatcttaacttcggcctgaattgtccaggggagcatgcctagcccccagcccaggtttccgtgatttgcaaataagcgtggcctccatgaccacttcctagctgagatcacaccagtgcagtgaggtggctcacagctgtgattaggaatccttttttgcaaaatgtgaaccatcactcctcatgtgttggtttccacaaatcacatattgttaaagtgggaaggagcgggtgagaggggatagaacccattcagaaaatgtttacaccaacccaagacttttcaacaggtagcttagcctggaacattgagtccaaatttgtagaaattaaaaaccatgggaatgggggaaagaggcgagagaaggcatccaaaatggtaatgtactaaagcacctgagtgacacgttacccccatggtccccaggctaagtggctggcagtaccagaaaggaaaaggaatagaattagtaacttttcaccgttcccttgccttcaacgccagggcctgagagcgagtgattacctgtcagatgctccagggagacttgagcctagagagacttaacaaaggccgtaaatgtgttcacatttttttaggctgcaggatgccacacctgggacgttattatggggatgtgattcagagaagaaaacaatgatatgcacaggtgtctctagtagcgttagtgatgagggtacatgctggaagcaattgtaaatgtgccatggaacagtggatctgtcctgatgacgcatcacctcaatggcattcaactcatgggaacactggcagcaacaaagaaaatgtatttgcaacagtcggtgaaaaacaaaaaaactccaaattatgcatcataatttgaaaataatataagaggctgggtacggtggttcacacctatagtctcagcactttgggaggcccaggtgggtggatcacgaggtcaggagtttgtagaccagcctggccaagatggtgaaaccccatctctactaaaaatacaaaaattagttgggcgtggtggtgcacacctgtaatcccagctactcaggaggctgaggtgggagaatcgcttgaacctgggaggcggaaggttgcagtgagccatgatcgcaccactgcactctagcctgggtgacaggcaagacttagtctcaaaaaaaagagaaaataatataagaaagcataagaacccacataaaaataagcgcaatttttgtgtccaggtaaagggaatggggatgcttttttcgtagacttcccttccacaccatattacataattttcgtttaaaatagggcttcaggccaggcgtggtgacacacacctgtaatcccagcactttgagaggccaaggcgggcagatcacttgaggtcaggagttcaagaccagcctggtcaacatggtgaaactccatctctaataaaaatataaaaaattagccaggcgtggtgacgtgcacctgtaatcccagccactcaggaggctgaggcaagagaatcacttgaacccaggaggcagaggcttcagtgagctgagatcgcaccactgcactccagcgagtgagactccatctcaaaaaaataaaaaatataaaaataaaacacgggctccagggagcttttctgaatgtgctggtcattactgctattcaccaggtactcccagtcttcctccctcctggctcagtaggattgtacttcctttctcatgtgtatttgtggggtgtcagggagcaacatatgaccagcaccggccaatgagatcagaggggaggtgtccagggtggggctggaagcgcaggtacaagacatggcagagctgctgctccagcctttgctgcagcaagactgtgatggcagctgctccatcccggtgggtccccgaatgcaaccagcagaggcctctctgaccctcaacgtacaggtagcataagcaggaagtgaaacgggttgtcttatgctttggagatggtctcggttgtttgtttccacagcaggacccagcctatccttactgataccggaaggcacagttaagataccaatagtctacatcttgaagtaagccagtcacagggacgtgtatcgtatcaccccacttacatgagatgcctagagtagtcaaatcatagcaacagaaagttgaatggtggctgtcaggggctgagaggacaggagaatggggagtctcttttgtgagtggagtttcagttgggaagatgaaaaagttctggagatggccagtggtgatggttacggagaaacatgaacgtacttaatgccacagtacagtgcacttaaaagcggttaagatggtaaattttgtgagagagagagagagagagatatatatatatatatatagtgtgtgtgtgtgtgtgtgtgtgtgtgtgtgagtgagtgtgagtgtgacagagtcttgctctgttgcccaggctggagtgcagtggtgcaatctcggctcaccgcaacctctgcctcccgggttcaagcaattctcctgcttcagcctcccaggtagcagggactacaggcgcactctaccatgtccagctaatttttgtatttttagtagagatggggtttcaccatgttggccaggctggtctcaaactcttgaccttgtgatctgcccacctcggcctcccaaagtgctgggattataggtgtgagccaccacacccagcctgtgttatatatattttatcacaattaagaaaaaatagtctctatctttgcaacagaggttatatatattttatcacaattaaaaaaaaaatagtctctatctttgcaacagaggaaacagactaggaaaaaggatgcctttgatttgatggtattccaaagctgggaggaggcacttaactactcctcttccctatacccaagaacagcccccttttaccttcttcaggttcatgccaccttcaaccagcaggaatttggggaagcaacacagaagctgcatcggccagcagctgggaaggagggaggcagcctgattcccatcaattcattagagctggaaaaccatgccaggtctctagcgcagaggccagtcgctctctacgggatgacttgaaacatctcaggcccccagggctgccccacccccttcattttcagaactcatcactgcatattgtgcaggctgtgaatcagccttctaaaatttaccccaacacccttgccctcattagagtcttctttacatgctgggtggggctgtagccgagtaccctctgcctcacttcacccctaccaggagcagtgttggatgtcacccttcacagtggggcaggcggaattgctcataatggctaagagccccaggctccaaattcaggatgcctgggttagcacctgtgtcctgagactgatttgcggagtgagcagtgccacccaagccgtctgcacagcacgtgacatgcagagagaggctgagaaatgaacgccactgtggtcactttcgctgctcctaccctcatgcccacgatgctcctgccttattgggtaacatagactcacagcggtgaaaaacgtgaggagcagagacatgtcccctccctgacatgtggtgacagagaatccctaatccttggggccacatcaaggctggaatgcacaggctctgtcacgggtgtttggtcttgtggctttgttacagcttgggcatcttattccaccaggcaagcctaagaggcctctgagaatccttccagccctagactaagaattcacattgagttaaacagctttgttcactgcaggacttctcagggcctgtacaatttaaatgttaaagcaaattgccagagaggggtagaggatgcaaacttggacccaggaagatgctgtaggattaatgttctaaggaatattctttggggagtgtcagtatccagccttcagtggggcccagagaagacttgacagtaaaagtcctcctttcatctatagaatcgaatccctgatacagccattcaccttcagaaatgagcatacgtggggacagctcacctggcaaagctggttcccatgccaggagacaattaagtaggtgtggtaggccagtgccctgcacagaatgttccccaaacgattcctggccttccacatttgaaggtggggtggctgcagctgcattgacctaatcgtcttcaaatgaggagaagcttctcactaccctactcaagacagatttctggggaagctccacctgtgttccttagagaacgtttctcttaggcctttggtttgcattgtctgtgacttggcccctgcagcgttcctgcagctaagattcaagcacctccagagaggctgattgaatcttgctggcgcctttgtcactgcccaacaaggtgcaccccatttagcccgcttcgggggcatgcagcctacacggtcgcacagggcccaagcccacaagagctctgtgcatttggtttggtgctccgctgtcgcatctggaaattcttaataatttttcaatgagggactcccgttttcattttgcactgagacttggaaagtatgtgtctggccctgaccacaggccctcttgggccatgtggtgaggtgccagtcagtgacctggaagcagagcctctgccccgctccctgccagggcacatttacattgcagagagggtcacacagccagttcaggagccttgagcccctgcagggtgcaggccacgccctcagcagaaaccacaccatgtttttgttttggaaacagagtcttgctctgtctcccaggctagagtgcagcagcgcaatctcagctcagtgcaacttccgcctcctgggttcaagtgattctcgtgcctcagcctcccgaggagctgggactacaggcgtgcgccaccacagtcggctaattttttgtgtttttagtagagatgaagtttcgctgtgttggccaggctggtcttgaactcctgacctcaggtgatccacccacgttggcctcccaaagtgctgggattacaggcgtgagccaccacgcccagctactacatttgttttagttatgaaaatctccttcgccaaaactcagccaggtttatggatcactgattagggaaaatgagaaatgttatgggtatcataaaatagatgtccagaagaagcaggctgcgtgctgttaggcagggaagatacggtggggtggacacaaggatgacctgcactgtagctccgtcacagctctcccccaccactgcctgcctgccctgccctctacagatgaaagccacacgtccccctgatggcacaggtagctgtccctgctgacacaggtggccgtcggcagcctgcaccccctggtgggtgcccccccaagctgccctgggggcctctcaggctccatgttgctcctgctggtggaagttgctgtggccagctgcccctgccctgttctgagtccctcacaggcaggctcattttagctctcttcacccacctgcagcttccaccaaattgaaccttccttacaccaagcacttacaacagaaaaagaggcctatttatttgtatttccagaccaaaaaatgttgagtggtaccagacacccaggcctctctctgtcctcccactggggctctctgtagacttggcatctttccctcagggcacgtggctcctgtccaggactgggcaggggactgaggtcaggtctcgggtgttggatgaacaggttgaggtgatttgtgggtggtggttgaggggagggacctacttggctcaacggctgcctctgacttgggagaaaatgtttgataagaagggcatccttctgactactgcgaagttacctgtgatcgaggattcagttcaaaattaagccaaacaccatcactgtgtgacctgcccgtgtcagccaaagtgactgactcctctttcccacgagaaaggaacatctcaagattaaacaagaggattctgtacaagcgctggtccttgctctgcctttctgacgctaagctcaaggttacgcagccaaagggggagcattacggaatttcccatgaacgctttcctcctgtgccatcccgccagagtgaccgggaagtgatggatccctcaggactacagacatgctggaggaaaaagttcaaagggcattgtgagctcagcctttcctcctagaaggtgctcaaggcccctcccaagagagttgctctgtcttaaataataatactgctaagttgccttcattcggcgcttattgggtacaacataaaatacaaggcactttactcccagaaaccccatcttacaagttggagaactgtgtttttgtttttgtttttgagacggagtctcgctctgtcacccaggctggagtgcagtggtgcaatctcagctcactgcaagccccgcctcccaggttcaggccattctcctgcctcagcctccccagtagctgggactacaggcgctcgccaccatgcccggctaattttttgtatttttagtagagacggggtttcaccatgttagccaggatggtctcgatcacctgcccttgtgatccgcccgcctcggcctcccaaagtgctgggattacaggcgtgagccaccgcgcccggcctggagaactgtgttttaaagaacgaagtcatttgcctgtggacacccagctgggaagttagtagagctagaattctggtccagatccacctgactctaaagccacaaggtcccacggggccaccgtgccttcctctctcagcctggtaactgtaaacccagtcaaagcggatgagggaggagtccaatggaagctaaggtcccatcactgctgctgtgcagctggaaggccctccctcagagcagctgcttgttgggtcagaggcccagtgtgaattactgggaacatcctcttaggccacgttctcaagtccccttcaccccaaatgaaagtgttggcattttctaccggccacccccaccttctgaccacaaagccatctgtaacctaacttgatcgtaattagatttttagcacataattacaagattaatggattaatcataatttatttgcaaatcattaaaaacattactcaaaaacactttccctaaagattgtttgggttgcccagggcaagataattaacgagacagaggggaaaaaatgaaaaacacacaaccgtcaatctcattaaagatgatcaaataaaccgtcaagttagctgagcaaactgtgcagcctgtggtggggctgagaaacctggtctgttccttggtgctgaattggctcttcaggcaccatgtgaatgaattactctgcctaaatactttcccatctttctttttttccggaacagcctccatttgatggtgaagatgaagacgagctatttcagtctatcatggagcacaacgtttcctatccaaaatccttgtccaaggaggctgtttctgtctgcaaaggagtaagtcgatttggataccttttgtgatcatggaccaagagctttggtaggagaaatactttccccacacttctaagagagatggcagaaacaccacaaacccacaccactgcattttggccatcgagggttggggcttggtgtcatgccccaagataaccagcaccccaactttggacagcatggattagtcttggcctgttttgaactctgcacaaaccgaaccttgtagtgttgctcctggcctggctgctttcactcaatatggtgattgaggatttagttcctcctttcatattgctatgcagtgttccactgtgtgaacacaccatcgtttccttatccattctactgggcagggcacagtggcgaaagtgaaggccaagagaatggattggaatcccaatacttcctgggactctggcccagtcacctaatgactgtaccgcacttttcattctaatccatttcataaaattgtggtggggactaccagatgtcatcagagtcccttagaaagtatgtgctctcgtctcctgtcttacttggtgtgacttagttctttctttgctacacttttcttgagctatagcatacatacagcaattggcacaaatcatcaatatgctgataaatgaatcttcacaaaatgaatccacccatgtaattgcacccagctcaagaaaccatgtttccaccaccctggaagccctctcctgtcccatctacagtcactaccccgccccaagataacctgccccccaactttggacagcatggattagtcttgcctgttttgaactctgcacaaactgaaccttacagtgttgctcctggcctggctgctttcactcaatattgtgattgaggattttgtctgcattgctgtgtggggccatagttcctcctgtcatattgctgtgcagtgttccactgtgtgaacacaccatcgtttccttatccattctacttctggtggctatttggattgttcctgctttggtttgaggctgttacaaacagaactgctgtgaaccttctggggcatgtgttttggtgaagatatgcacacactttggttgaggaaatgctctaggaatagagttgctggtcatgacttgtctagttttgaatggtcaagagttagatcacaaagctattttcaggcttagtaagatggagtacaatatacccttaacagtatctggtgagtgtgatcatttgtgaggcatttgtcacgtgtcatccaagagcaaggcacttggaagagatactgagatcgggaggaactggcttctgccttcagagagttcatagacagtgtttgtctctgtgtcctgcagtgggcaagtcggaattaactagtcgccttccttgttatagcatttatttttctaatctatgagtctttgattgataacattttggcccagacaatacgtagacatatgatgcttattatggcatcctctgtgatgctagactgtgatgctttcagcacacacaatttttagtgattgcatgcttttttttttattactagatacatgtatagcatggtgtctccaaaacagacaacgtgtgagatgtctgtttaaattcttcttccatttggccatgggttcagattgcttccttgttcccttgtcttgaaaaccaccataggaagggctattcttgccaatgtcatttttgtgagttggcttcacttcgtacaagccactgagtgtcttggtcagctctctgagatgctgtccaggcgtccacaaagtcagggctgtaggcagagctaggcaaatggaaggtgctgtctgtgggaagcccttgacatccattgttctccttttctccttttcctttctagctgatgaccaaacacccagccaagcggctgggctgtgggcctgagggggagagggacgtgagagagcatgccttcttccggaggatcgactgggaaaaactggagaacagggagatccagccaccattcaagcccaaagtggtgagtccagaaaagcagcctgttttcggaaccccatgtccccaaattctgggagtatcccactcacctcttttcttggagagaggaggccggtgcccctggcttgtacagggtgaggaaacgggccaggtttcagccttgtcctcagtcctgtggcctcagcagccgggattcctgctgccttcagagagtaaggaccgataaggcagggaggggaaccctgtgcacacttcatcctccagctggacagctgcagagcacccccgcacgactagggagtgagggcagctgtgctttaggtctggactttgtggactcgcacccagcagggccgtattcacagccttcagtcctcagcaggactcaggcttcgtgtctgtctctggttttcctgggtttgcctggcaccgaagggagctctgaagcacaaccccgtcctagccagcaactaggcagggcctgggccccgccccctcttccaccactgcctccactgcggggagtgagtgtcagccaccaattctaatgttgtcagcttttttcacactctccctgtttgattcccatttttttcatttatttaaacactgtatgccaggccctgttctgagtgccttacgaatattaattcactcaatcatcccagcagccctgtgagatgggtactatggtccccagtttgcagtggaggaaacagtcacagagaggctgagtaacttgccagaagacacacagctgatagatggtgaaaccaggacgagtctttgtcctcacctactgcaccatcgctccatctcagcaactgccctgacgctgatgctgtgggccctaattgttgattgcggccagcaagtgcctttcatgtttatatctctagaggtaaactgagagcctttaagaagtcagcctgctcactcaccacctgccactttgcagagcctccaagggcgtcctgtttctaagggccgggcggactgtgccttccagctctgccaccatcttggccagcatcaggcagctccccattgtgcctctgcccggggactgcagagagctgctttatgccacagtcagtttcagaagcatcgccctgttggtttcgctcaaatgtgtctcctctgacaggtgccccatgagcaggccaggggacccacctggggtggcacagttgccaactgggtggcacacagccttattcttagagcagcaacttcctcaccatgtgtgcctctgtgtcctctaccccaagaataaaactgctgttggtgagcccactggattttatttttcgaagatatttttagcacacactgaagaaaaactaaaattaatcaggtcagttgacttcctcctgaatcatcgtttcaaataaggcccttttgtatctgacacccccgccttttctttagtcagccctgcacactgatttcaggggggtctcacgggctcctgcccctcaacatacaaaacccggtctggaggtttttgggggtggggagagtgattaatggtgctgcaagtggtctcagtagaaaattctgttagggattatttttttttcctcttctgcctttaatatttatttgttgtcttaaaatatgaaggttatgcaacagcatcttgaacacagcttagtttctttataggaacaacgtagagatgcgtactgaccccgccttgagggttgggcaaaatccaattacctgtcagtcactttccagaaagcgatgagttgcagcaaaaccaaccataaaacatgtctttttctatttattgccacgttatggcagaagagagtgtttatttgcatagtctcccacattttgtggatactcggccctaagctcggatatagggaagacaacagggcgacttggctccgcaggcaagaatgtgaactgttctctgtggtccacggaaatcacaggaagcaaaattgtacccatggcaggcagctgagttaggagcagtgtttatttatattttattcctggagcgctactgtttgctggttttttttttttttaaattattatactttaagttgtagggtacatgtgcacaatgtgcaggtttgttacatatgtatacatgtgccatgtcggtgtgctgcacccattaactcgtcatttagcattaggtatatctcctaatgctgtccctcccccctcccttttgtttgttttttaactgaatgctcgttaaaattaagaaggaaggataaattgcccctggctgtgaagaaatagcccctgaactcacaaacggaggcagaaattgtcgacccaggccctaaaactggaggtttcatgcaaaaggccccgcttggtaaaagctctggccagaaggaaggaagagatttctcaggcagaagcccgtgttctgctggaaaacctgtgcacaaaagaggaaggagctagaaagaatacagacagacaggaaatggacccacagagggaacaacgacagtgaagatagaagcacgtggctgcagggagacccgtagacgctgtgttcaaaagcggagagcgtcaagggcagagagataaatggggcaagctctggttcctggaagggcagcgatgtgcctcttgagagctgtttcctgtagtccttgccccgtgccaggcagccgagtgaggctcatcgcagcatgtcatgcaagggctggcaccaccgccttcagcggtctctgaggactgcactctgttcagtggtgacacgctggggcagagacaccacgccaagagccattccagtggctggagaggacatttagaacagcaaaaagcaaccaaagtcgaagctgcacaatacgctctggttaatacaaacagcaggagagaactagcggcgtagaaaagttattctgggatgtggtgttccagcttccttggtgaaaaatgtactgtagtttcctgatccagagctaactgaaaagtgaaatgtgtttacagagctgagcattctctaacgggtcattttgttatttcaaagagagatgtagcaatgccagcctaaatagtgctgctggagaaacgatcaggcaaatgtcacacagctagcgactctcaccgtgagcccatttctgagtggctctcgcctctcagcagttcttataatcctggctcaccaaccttttctgtcttggtgaagtctgcctgatggttttttagcaagcgctggtgagtcagtttccctgagacttgcaggcttaaggacaggtagctgttctcacgtgcggtgatgctcctggctcccatggaattaaacctttgcttactaccaaataccagtagcgggacttcaggttctcacagttatttgcaaactgcttctacagatcagattgagcttgtaggatcaggagtctatcatctttgttttattaatttttaaattttttgaacctccaatgaaagagtcttccagaatcactgacttccctaaggagggtagaagcattccactgctggacagccacagagcttatcagggaatcatggttcctctagtgtgctgtcttaatccctcttcctgactgccagagtgacttgactgaagttaacctttagaccgcagtgccatgcaaaatgcgatcccagcgcaaaaagcatctcacaatgccgtgatccatcaggaggttagcacgggactttccatctcacggcgacattaagatcaagatctgcagtacagctgtgggctggattctgtataaggtcacacgtaaaggagaacagaaagaggagagtgaccagcatcgagtgtgtgggacagtggccatctcccttagcagtggccaccttccctggcagtggccatctcccctggtggtggcagggtcccatggcggtggtcatctctcctggcagtggcaagcctggaggctgagatgtgagggaagaacctgcccctgtggcagtcaacagtgggagagtcctgtcctggacagagccatgtctgtccctaaaaagctaccatgtgccaccgtgaagatgatgattttctggaagatgggacaatcacttctcagggatcattttgtaaaaacaaaagcaaagacaaccacagacagcagtgctgtgagccctggacacaggcagccaacaactagctcttcctctttatgagcaaaacacaaaacgagctggtttcggggatctcttcaaggaagcacaatgtgaagcatcctctgctccccggacatgaggacggtcagctcattgaggaccgtcagctcagtgaggaccgtcagctcagtgagggccatcagttcagcctgatgttctcaacaacaaacccgagtcatcaaaaagaggcctgtaggccaggcgtggtggctcacgcctgtaatcccagcactttgggaggtcgaggcaggtggatctcctgaggtcaggagtccgagaccaacctggccaacatggtgaaaccccatctctactaaaaatacaaaaattagctgggcatggtagcacacacctgtaatcccagctacttgggaggctgagacaggagaatcgcttgaacctgggaggcggaagttgcagtgagcccagattgcgtcattgcactacagcctgggcgacaagaatgaaactccgtctcaaaaaaaaaaaaaaaaaaaaaaaaaaccggaatgttcagaagagtctaggtaaggagaaattttaagtttaaaacagatgtcgcctctggaaagggtaatcttcagtgactgaaggagcagtggatgtccaccctacctcccagcgtcaggtgagcgtggaggcactgtggggaggagggtacagccagcagcttggcccagcaaccagaaggctcaccgagggaaggaaagcactttcggctttgccagaaaaataaaagctccaggattctgatccaccgtcactttgaattttgtagctttttattctgatttagaattaatgtgaatgaaatggccaagaacagccttcaaatttccactcatcctgcttgtaatcagtagcagtttatacaaataccaggagcataaggttaattgatttttctttttttagttctagccgttggcaccaaggagcagaatagctagttcataggcaagccagaatcattcactgtacttaaatggttattagagagggagaaattaatctataatgttaacacaagaaatgtattccagagtggttaggcagagcacattggaaatagacctttcacagatggccattttttttgtgaaattactttaagtattctgttttttaaaaggcagaaaaatagaactttcttcaggacattgtctccaatgacccacagcaagagccaaagagaataagaacattgaggacatccctgtagtgagaacacacaatcggggttccttttcccagtcaccacaaagtccttcatttcccagtgccattagcttgtttagagagcttgatgatcatttaattatcgaagctggtgcaaggatccttttttttttttaattttattttgaaataatttccaatttcagacttgtggaagggccaggaaagtaatttaaagaactcctgtattcctttacccaggttccctaaatgtgaacattttagcatgttcgtgttatattgttttttttgttttttggggggggttttttgttttttttttttttgagacggagtttcgctctatcacccaggctggagtgcagtggcgcgatatcagctcactgcaacctccacctcccaggttcaagcaattctcctgcctcagcctcctgagtagctgggattgcaggcacctgccaccatgcctggctaattttttttatatttttagtagagatggggttttgccatgttggccaggctggtctcaaactcctgacctcaagtgatctgactgcctcggcctcccaaagtgctgagattacaggctgacctcggtatcattctttttctatatctctgtctgtgtgtaggtacagacatacacatctgttaggttggagcaaaagtaattgcggtttttgccgttacttttcattttttttgccattacttttgcaccaaccttaatatatacttatttttttctgaaccatttgagagtaagttgcagagttaatgcttctttacacctagataattccatgtgtatttcctgaacataaggacatctcctggtactatgttcttttaataattactccagcaagctaggtatgtagtgcaggggctctgcaggtaaaaggaggagggagggtccctggcatggctgtgtcacagatcagataccataggcagcttgggccacatctcatcagttctctagggtggcaggcagcttcattctcttggcctttctgttgggccagtaacaatgatgccaattaaaattgagatctcaagatgggaaggtttgtcaacaacatacaaacactaaccagccattggagactacagaagtcacatcatgctgtatctaggtttgatttaagcctctaaactagtctaagacagcaccttttacttggctaattagaggcaagcagtttttcctattctttaatcattactctctcaaatacttttctgcttagcagagaaattggaagaaatgagacatttaaactaataatataaataagcatcactactgcaagcctctgggagcttcaatgatgagtgacggcataaatacagaccctgtgtacatcaaagtgtatgaattgacaggtttccattgttggcagtgaaggtttccaacaacgatggccattacaacttttcttggaaaaagagctttaaatcctctaaatctggccattaacataaagaccaaatggagtacatgtttttattccatagattacagcccatgataagccagaaccttcaccctcatacacacgtggctctcacacctacaggaatcccctcatttaatgtgtggcttatggcctctgtctatcagcaaactcatcaacggaatcagccttcctccagaagagagttttccctttctgagataatgctgcagtgctgtaggtgagctgagtactgtttaattttgtcagagaaaccaaagactatatgaagttggcaggaggtgaaaggggtcccaatcccttagaaaaaattactattaacatgctctctctatatggtgaaatgaacagttaagtggtagagaagggcataaatgaaaagatatctccccaactactggtcctactcttcatgatcttttctgtaaccttctagaatgtttctgtatgtataaacgtatacacagatgaggttgtgctgtgttaaacacaccttgcgtctttcacgtagcaatgtatccgacaggtgtttccgcatcagctcacgtgggtttatagcattctttgcgtgtccattcccgattctggacttgcaaggccaggaactgactattctccaaatcctctcctttgtccgttcttattctccagactttgtgtaccaaaatgcactggcttcagtgggcctccaggtcttcggtgagcacgtttccagaaccttgggtgactaaatgagcaaactaaccccactttataacccttaaccgtgtgcccctgcttgtgttggtcatgcacgtagcccgttccctgagcatgctaatcttcagagaaagggcagaccaatggccagacccctttgctggatagctccttagtatggacattacctcccaggaagcccaagtgaaatgcaccagcccatttctgctgttatttaacttaaaagaagacgctgtgcaaccacaagtcagagagctgtgcagatggtggcgatgcggttgctaaggcgctccactgtaccccagcactgggacctgaatacaagtgagggttcccctacgatgaagtacctcctgcatttggtcatcgtaaggggtagctcccacctcgttaggtttcctttctccatagtcttgcaacatccctttactctttatttgttctgcatctttcctcttcttctgggttttgtttggttttgctttttaacagcagtgttttgagctactcatatttcccataattcccatagctgagaccatggggttgtattctacatgactgagacgccgaggtaaagggcaggggtgagaccaacacgtgtattgctcatgctcagaggcctctcccaggtaagaatcagccacgaagccaactcctgcattgcatctcagtctcccccacaccctatcacagaatgaaaggggctgtgagcaatgtgtttgccacacaaggctccagtgggggcacactgcaatcccagattccacccagagtccgtgtcattcatgttttgtaacatctttaccaatgcctgatttctcttgggtccgttgcattcattgaagtttgaccaaatgggtaggaatatcaaaaacgacaaaggagttcattcctgaatccagagatcagaaagagggaggtagcttattaataacgttccttcgtccctcagagatcgatcacatgccttttacatgctagtgcttgcttcgcagggtgtaccctatgtctgtcctgcctcctcgctgaggaagggcctcatgcccactagttccctggatcctcacaacagcctgggaaggtggatggtcacatcaccatcttaccttcgcagagagatgcactgagtttgccaaagctatatacattggggctcttgatctctggccacatccttctcccctctgtgtccccactttcccttgggtgccgacatcgcctggtctcagggagttcagcagtcacacgctgactggttgggtctgaccaccccagtgccctcttcccctttatctctgtcccatacccatcgtgtggtacgtcacatcccagagggcaaaagcctcagtcggcaaaaggcgcgggtgacctttggaggtggagacagtgcgcacccagcccagttttgctcacaaggtataaatgttacttttagtggccatgtgctgttgggtggcctacagctctgaggccatggacagccacacctgcccgctgtcacagactgctgtagaggctgcccttccaatggaggtggtgatccacctgcctgcctcatccctgaggagtggcgggaggctgcctgcagtcatcttttactcattcacttggcgttcatgcagtcatgctaggtgccccctcagccctttagcctctttgcttcttcttgctccctgctcagctccaagatggcacccgaggccattgcccatcaagctcatggtgatgagtaaggttagatcattgatagtaggaagaatctcttccacattaggaatgcagtaccttcttgaatctactgcttttcctttctccaaggatccaaaaatctctggttttccttatctttttcagtaggcggtggtggtggtggtggtggtggtggtgatggtgatggtggtggtggtggtggtgacggtggtggtggtggtgacggtggtggtggtggtggtggtggtggtggtggtgacggtggtggtggtggtggtgacggtggtgacggtggtggtgatggtggtgacggtggtggtggtgatggtggtggtggtggtggtggtgatggtggtggtggtggtggtggtggtggtggtggtggtggtggtggtgatggtggtggtggtggtggtggtggtggtggtggtggtggtggtggtgatggtggtggtggtggtgatggtgatggtggtggtgatggtggtggtggtggtggtggtgatggtggtggtggtggtggtggtggtggtggtggtggtggtgatggtggtggtggtggtgatggtggtggtggtggtggtggtgatggtggtggtggtgatggtggtggtggtggtggtggtggtggtggtggtggtggtggtgatggtggtggtggtggtggtggtggtggtggtggtggtggtgatggtggtggtggtggtggtggtggtggtggtggtggtggtggtggtgatggtggtggtggtggtggtggtggtggtggtggtggtggtggtggtggtggtggtggtggtggtggtggtggtggtgatggtgatggtggtggtggtggtggtggtggtggtggtggtggtggtggtggtggtggtgatggtgacggtggtggtggtggtggtggtggtggtggtgacggtggtggtggtggtggtggtggtggtggtgatggtggtggtggtggtggtgatggtggtggtggtgatggtggtggtggtggtggtggtggtggtgatggtggtggtggtggtggtggtggtggtggtggtggtgatggtggtggtggtggtggtgatggtggtggtggtgatggtggtggtggtgatggtggtggtggtggtggtggtggtggtgatggtggtggtggtggtggtgatggtggtggtggtggtgatggtggtggtggtggtggtgatggtggtggtggtgatggtggtggtggtgatggtggtggtggtgatggtggtggtggtgatggtggtggtggtggtggtggtggtgatggtaatggtggtggtgatggtggtggtagtgacggtggtggtggtggtggtggtgatggtggtggtggtgatggtggtggtggtgatggtggtggtggtggtggtggtggtgatggtaatggtggtggtgatggtggtggtagtgacggtggtggtggtggtggtggtaatggtggtggtggtggtgatgagggtagttttccacattaacatcttgcaaaacaagtagttcaagatcttctccagtttgacttatagtagattgtctatttccagggctacttttgctaagagctgtggaaggctcatttataatgcattggcagaccttctatggtggaaaaggagacgatgtttctcaccaggccgaatctggagtagaaatagctgtgctgccccctgcctcttggtgggggaaggggacttctctgtggtttgatctccctcagaataaaaagttctcctgagtctcgtagctgatctaaccctcaggtcatcctgcagcccttccaggctttcttccggtttcttgctaagacacacccatggctcatttctgtcccgtggttgatgtggctgaacttcagtggttcagtttctactgttcgccctcggcctgtgcctgcctcttatctctccaccgaagtgaaccaatttaagaaaagctttcatttgttaaagtgagatttctccctctttgagttcagggaaaattccaaagagatttacagtgagaaagaagaggaaggtgtttccagcagtgagcagttttgagaccagaagccacacagcagcactcagtgtgactgcagggcagcaactgggttgatctaggctccacaacttcccctttagctctgcagacctcagcacaggcggagcacgagcccttaaccaggaagggatttttgccccattttatcacagtacttagctttttgagcagtgggcaccctcaggagtgacccttctctggacaccagctttggaattggatgtcctcaagcctccctctccaggcttctcagtggggaggtttctgtggtcccctttttagagcttgggaaatctccttttagtttgctttttaatttttccttggcagtaaagccatggcttttggaaacgtcccattggacgatgattcatgaatgccataaagacaggactaaaaggaaagggtcagacctgtgcactctttttgcagaacacattgataaatttagagcaggacagacatccagcctagacgtctatctgtgcagccctaaattcatcaacgtgtcctgtgaaatggggagagaacattttactttgctttgctcatccttttagggactcagtccttttattagattttttccagaaattccttcttgctcatctttgcatggttagtgagtatcaagagaagcacagatgatctctcattaaaggagcacacatcccagcctctgggagccctgactgttgattcacttgaattcttccaggcaataagcattgatgaatcaggttccaaaaggatgttcccaatgccgactctactgagctgtcacacttgctccaaatgcttttgccttgtgacttctgccgcttctccattctccgctctcacatacggctgctcctgcctgattccctagtttggcttcatgtctgccctcactctgatcttaggacctactcagcctcacacagtagtcttgttatatccctgagtttctcagcagcaggtactgttgacatcttgagccagtcattctttggggcgggggcagtgtcctgggccttgcaggatgttccacaccatccctggcctctgcccccagatgccaggcttgtcccacccaagtcatgatgaccaaaaatgggttccctgggggaagaatcatccctggttgagaaccactggtataaccagaggagggctatttctttggctgttgtcatctgaatgtggaattccaaggaaagttggtttctgtttgtttaactgatgaattaagtacagactcccgattaatttctaggaagaaacagcatgcccttatttatttttcaaagagcctttctccgtgtttgcaaatggcctgtgcacatagggtgatgtgaattgcagattctgcctctgctgaccttggctttgaggtactttgtgctcttccaaggaaatacaccatggaaacgtggggtgtgagagtggaagctttgccagcccacatgtgggaggcaggacggatgtgacagtaagcctcatgtctgtatggctccacagagtaacttgaaagcccacaggcagcccctgcctctcatcccctctgccccaccacacacatcacccacatactcaccattcattgtggtgtgaaatctccttgggtgaagagtagatggttgcttattaaaatggaaataagcccagaggctggacgcggtggctcacacctgtaatcccagtactttgggaggccaaggccagcagattgcttgagcccaggagttcgagaccagcctgagcaacatggtgaaaccctgtcaatacaaaaaatgcaaaaaatagtcaggtgtggtggtgcgcacccgcagtcccagctactcaggaggctgaggtgggaggaacggttgagctcaggtgttgaggctgcagtgagtcgtgctcccaccactgcacaccagcctgggtgacagagtgagaccctgtctcaaaaaagaaaaaaaaattaataagcccagaaaggaaagctgtttgtcataaagaccttactttgaatttatgacatgctttccacctcaacaggtacttaggagcaggttttatttgatgaaaagtaggtgggaaaagggtaatgaaagtagcttcgtcgctgggcgtggtggctcatgcctgtaatcccagctactcgggaggctgaggcaggagaatcacttgaacccaggaggcagaggttacagtgagccgaggtcacgccactgcactctagtctgggcgacagagcaagactccatctcaaaaaaaaaaacgaaagtaggttctcaagcacacctcctagaagataaagtgtgaaaaaagagctgagaaagcacagcccgtgagactcaactgccttataaaaacactagcagcacgtgctggcctctcgcctcggctgggttctgtgcaaaaccccatacatttcaccttcctgacagccttgggcaggaggtgtgattgttctcccagtgttacagatgagcaaacttggtggaccccacttcacagttaatccagagctattctctgttagagacccaaggatgcctggttagtttgaaatgtgtgctagctcagagttaattcatattggccctgtggtgctagcagcaggtccaagggcagtaattggcagcatcttgaaaatcattcttaggatccttagtgaaactcccagctcttcctgcttcagagtcaccctgggctcccggggacttcaacacgccactacccttgtgggtggctgacaaggtgaagagaacactccttccccacttttggggtcaggctaccaagccgtgctgcctaagcggctgtgtgtctcagcgaccccagtgcaacagttctgcctggagtggaccctggaggagaggaacagccgagacagcaggcctctccctgcctccccagggcgccatgcaaacatcctccagcctgagaccaccctgcaaataagctccagtcagtcacccagcctgcccgctggccagctctgtctaggtgtgctaaatcctagctgggccaggtgcaaatctcccagccttgccgccacacctacctcatatcgcttgaagcttaatttaggggctggggttgctggagcagcccagtaggaaggcaaggataacacagtttttacttcactacaaatattgcggcaaaaaaacagatgtggggcagtaactcaccccgtcgcttggtccaggggtaactgcctgcagccccagccgacatcctggcctttcaacacggagctgtgactgacggccctgcgtgcgtggcttccgtgctctcagctccgcttgctcggtgaggtggacgtgaggggacaggggctgtccccttgttgctgcctcattgccagccgtgcaattcccacccagggcttctgttcggggtgtttcagggtttacagttgggtaactcgttgttgtctgctgtgcctggcttttcaatccaataggcctgcaagtcctccgagattcctcctcctaaccagcccggagttccccagggccgtgcccctccccagagagggccctcggagagctgctcccgcattgtcatgttgactgacctttccttctttttgtcttttctccacagtgtggcaaaggagcagagaactttgacaagttcttcacacgaggacagcccgtcttaacaccacctgatcagctggttattgctaacatagaccagtctgattttgaagggttctcgtatgtcaacccccagtttgtgcaccccatcttacagagtgcagtatgaaactcaccagcgagaacaaacacctccccagcccccagccctccccgcagtgggaagtgaatccttaaccctaaaattttaaggccacggccttgtgtctgattccatatggaggcctgaaaattgtagggttattagtccaaatgtgatcaactgttcagggtctctctcttacaaccaagaacattatcttagtggaagatggtacgtcatgctcagtgtccagtttaattctgtagaagttacgtctggctctaggttaacccttcctagaaagcaagcagactgttgccccattttgggtacaatttgatatactttccataccctccatctgtggatttttcagcattggaatcccccaaccagagatgttaaagtgagcctgtcccaggaaacatctccacccaagacgtctttggaatccaagaacaggaagccaagagagtgagcagggagggattgggggtgggggaggcctcaaaataccgactgcgtccattctctgcctccatggaaacagcccctagaatctgaaaggccgggataaacctaatcactgttcccaaacattgacaaatcctaacccaaccatggtccagcagttaccagtttaaacaaaaaaacctcagatgagtgttgggtgaatctgtcatctggtaccctccttggttgataactgtcttgatacttttcattctttgtaagaggccaaatcgtctaaggacgttgctgaacaagcgtgtgaaatcatttcagatcaaggataagccagtgtgtacatatgttcattttaatctctgggagattatttttccatccagggtgccatcagtaatcatgccactactcaccagtgttgttcaccaacacccacccccacacacaccaacattttgctgcctaccttgttatccttctcaagaagctgaagtgtacgccctctccccttttgtgcttatttatttaataggctgcagtgtcgcttatgaaagtacgatgtacagtaacttaatggaagtgctgactctagcatcagcctctaccgattgattttcctcccttctctagccctggatgtccacttagggataaaaagaatatggttttggttcccatttctagttcacgttgaatgacaggcctggagctgtagaatcaggaaacccggatgcctaacagctcaaagatgttttgttaatagaaggattttaatacgttttgcaaatgcatcatgcaatgaattttgcatgtttataataaaccttaataacaagtgaatctatattattgatataatcgtatcaagtataaagagagtattataataattttataagacacaattgtgctctatttgtgcaggttcttgtttctaatcctcttttctaattaagttttagctgaatcccttgcttctgtgctttccctccctgcacatgggcactgtatcagatagattactttttaaatgtagataaaatttcaaaaatgaatggctagtttacgtgatagattaggctcttactacatatgtgtgtgtatatatatgtatttgattctacctgcaaacaaatttttattggtgaggactatttttgagctgacactccctcttagtttcttcatgtcacctttcgtcctggttcctccgccactcttcctcttggggacaacaggaagtgtctgattccagtctgcctagtacgttggtacacacgtggcattgccgcagcacctgggctgacctttgtgtgtgcgtgtgtgtgtgtttccttcttcccttcagcctgtgactgttgctgactccaggggtgggagggatggggagactcccctcttgctgtgtgtactggacacgcaggaagcatgctgtcttgctgcctctgcaacgacctgtcgtttgctccagcatgcacaaacttcgtgagaccaacacagccgtgccctgcaggcaccagcacgtgcttttcagaggctgcggactttcttccagccattgtggcattggcctttccagtcttgggaggagcgcgctgctttggtgagacacccccatgcaaggtcctcagagtagccgggttctaccacaaacagaaacagaatgaaagtagctgtcagtccttgtagagagccgctctgtttcctcccagaagcatctcccagctaagctcgcattatttttctcctctggctgtttgcctgaagttcacagaacacacaaccatgaaaggctttttgaggtgagaggcccaggtggtcctggcaaccctgagtagaaggagagacggggtagggaacgggcccggccagaaaagaaccatttcttctgccatcttttatgcaccatagacatcgagactccagggggtcctggctcccctgtccctgcagccctgcaggtcagtgcatgatctgggttcgtgtcctgaccaggtgctcctcctttgatccgaggggaaagggactggtttatagaaagagcctaggagacaaaagggccagtccccctgcccagaatggagcagcagcaggacagacccccacgaggccccccagagaggaggaagatcccacggaggaacacatgaggttagggacccttgttcagcaccccaaacagcctgcctgtttaaagcaggcagcaggcttaggccttccctgcaaccccaacacccacaagtttgtttctctaggaaacacattcactgtctcagctggctgttactctctcagaccatatggcaaagttttccaagaaaatgccccgacaggggtgcccagcacactgcctgagggacaacagacatcagaacaaacccccagagagaaacagtcaaaatcagggcccggtgcagtgttgtcatgtggaacctgctttatccattgctgagtgttgaatgtgggtaatggttagggctttccagatctcagcagccaaagacagttattgttggaagactgtcatgtagataaccatgagcaatggctcgcctcagaatcagttcataaaattctatggtactggccccttcgtgggtattgtgtgaaatgagatggtggcgaggggtgcgctgtggaactgccgcagccacgcaggaggtccctgggggatgctttgggaagtccttgcccctgagcactgcctgattgccagggcctgtggaggtctaggccgcctggcagaatctagcaccgtccgaatccccgcaggacccatggagctatgaccacaccaggccattcaaatggctctgcattatcttcccttggaaggtggccactcctcggtggcagggcctttccctgaggctgcaggccgtgggctggcagcccgtctcttggcatttcaattgaaggtcaccaggtgctgggtttgaaaggaagtcactggagtgctgccaggggccgccctccaaggttaatgagaggcccacatccaggcaagaactaattcaaaaggcagatcagaaaccacaggagtcaaaattattgctccggcagtgcttcccttcctttcatccactggcctcgtgtggtccatgcagggccactgtctgccctttctgatgccacgtattaggctttcttactcagaattttgatagaaaaccatggggccaagagctctggaagcctggccggaaagaccaaggttcatgcagcccaacaaatgattgttgagcacctctcggagccaaagtccttaggcgagtgtggtgacttcctggaaggaggatgcagacttccagagagcccccccaacggacgtgctgagaagggagagggaggcgggggctgtagtcaggaaggagccagagaagaacagggtttgggtgcatccagaaatatgcctgcagtaggagggagaggaaggggtgccaccgtcaacggcttcccatcggaggtggttggtgcagatggaagtttctgtctgctggccctcaagagagtgttttgccagggacacagtctgttcctcctcagaaaacaccccccaaatgctaacaacatccccaccagctgctagaagcccctttcccctccccaccttgaagtagctcatagttctctgggcagagccagaccatccagtgtaccccagaggccagtaggttcctgcccattttcctctctggcttcctgccaagaattatggcagctgaggatgaatggagaagtaaaaacaactaacaccgcacaactaacaactaacaccgcagttcccacctgggttccacttagcaggagacatttcggagggttttttttgtttttgttcctgttttttttttttttgctggaatttgttttctcagtactgaaaagagaaaaagtgacaatcttgtatttttaaaagcctcggaaaggtgataccatctgacagtcattttctcacgttggtcttctaaagtcacctatttcttgtgtgtgcacatcacaccatttcctgtttctttataacccgacaagggtaggagtgcctgtttcccctgctgggcacaccagacaatcgtaatcacaaaacagacactgagccaggggcccaaagggtgtgatcatgagagttaccgggacagcagtaggcatgacagtcaccaggaaggacaagggtgctctgttgttagtggccacacaccaatttgacaaggagtgttgcgaaatttttatttatttatttatttattttgagatggagtttcactcttgttgcccaggctggagtgcggtggtacaatctcggctcactgcaacctccacctcccaggttcaagcgattctcctgcctcagcctcccaagtacctgggactacaggtgcgtgccaccacacccagctaaattttgtgtttttagtagagatggggtttcaccatgttggccaggatggtcttgaacccctgacctcatgatctgcctgcctcggcctcccaaagtgctgggattacaggcatgagccaccacgcccagccaaaatatttttttaaagtcattttccttaagctgcttgggctacatgtgaaatacactggacggtcaacattcctgtctcctcccatttgggctgatgcagcagatccagggaatgttacctgtttctgctgctagaagatccaggaaattgggaaggttacctgacgcacacatggatgaaggccatcatctagaaatggggtcaaccacaattgtgttaattccgtagtgtcagggattcttcgggaaggtcaacagtatgaaggattctgacccctgtgcctcccatttatgtgatcaggtgacagttaataaccgtggaggtcacactcagccatccaacagccttacagtgaccctacacaaaagcccccaaattccaaagactttttcttaacctaaaggaagaaattatttgttaattccagtagagcaactgaatatactgggctatttgtacttttttatagagaactttaataataattctttaaaaatgagtttttagaacaaagcaactgacgatttcctaagattccaatgccctggagcttgtaggaggacttagcctgggtcagctggagcacccccgacctgatctcccactgccagattttcccatgctcctagggtatggagtccacgtgggaatgactgcaagttcaggtggaacttggccgactgatgctctgcgagtttttaatagacactggggacaactgcttaaggtttagaaacttccaaaccacaggaaagacatttttagtgtcccccatccagaggcagccctggaataggattcccaggggtttctgggacccctttccttgctccgtgaggctctgtggccatcttttggcaggaggaggatgcttccttggctctgtgcccagacccgcctggtccccaggtctctcaccttgggtgaagattcagagatgccctgtaaggattttgcccactgggcaactcagaaatacttcgatctcccaagatataagaggcagcagcaaacgtgcctattgacgtctgtttcatagttaccacttacgcgagtagacagaactcggcttttcagaaaataggtgtcaagtccactttataagaacctttttttctaaaataagataaaaggtggctttgcattttctgattaaacgactgtgtctttgtcacctctgcttaactttaggagtatccattcctgtgattgtagacttttgttgatattcttcctggaagaatatcattcttttcttgaagggttggtttactagaatattcaaaatcaatcatgaaggcagttactattttgagtctaaaggttttctaaaaattaacctcacatcccttctgttagggtctttcagaatatcttttataaacagaagcatttgaagtcattgcttttgctacatgatttgtgtgtgtgaaggacataccacgtttaaatcattaattgaaaaacatcatataagccccaactttgtttggaggaagagacggaggttgaggtttttccttctgtataagcacctactgacaaaatgtagaggccattcaaccgtcaaacaccatttggttatatcgcagaggagacggatgtgtaaattactgcattgctttttttttcagtttgtataacctctaatctccgtttgcatgatacgctttgttagaaacattaattgtagtttggaagcaagtgtgtatgaataaagataatgatcattcctttgtgtagttggccttatttacatccctttgcggtatggcaattatttttcctccagtgttcaaaaaatagcatttgacttcagacacactccgcagaacactttcatctcttcacctgtttttcaggcatgaccctccatttatagtggcattttttttttttttttttttttttttttacttaaaaaatatatcttgctttgaatcaaagcccagacagtgactgggatggcgttctggcaggtcctgcgttcattcattcatgcactgttcacagagcccctgcttagggccaggagttgtgtcaggccctggagaagaagaggctggcatggcccctgcctgcacggagcttacagtcttctgccccaaactgcaagggatgcccagcaactgatgacatcatctaaggctggatggtgcccttcccctggaaggaacgattccagaatgaattctgctcaagtctggagatgttttctccaaaaataggtatttttcacacatcccgttggccacactgtggatgcagcttcaggaccgtccccactctgagtgtcagccgcctcgttctgcatttattcacggttgaaaaattgggggaaatgttcaaatgtggaacattcaaaaatacccagcacttaacaactcaacgcaatagagggaattgtcctcaaaaagaattaaaacaggctgggtatggtggctgatgcccataatcccagcactttgggaggccaaggtgggaggatcacttgaggccgggaggtcaatgctgcagtgagctacgattgcaccactgcactgtagcctgggtgacagaaggagaccttgtctcttaaaaaaaaaaatcaacaacaaacaccaaagccaagatccaaccttggtaaagtcaatctttgctgatttcctcacctccttttggggaatgctctcccctcgtgctcatggcttcaacccactgctgccaccctccctcccatagccccctaatcctgcagccgcccagcccagcctgttcctcccagcacactctgcatccacacacatgcctccctgcgttctcttccctctgggccttgctcccagccagattactcgagtgtcagcatcctctcagtggatttttccctccctaagatgccgcggtcacactcaacctcctggaagtgaaggctctttcagctgccaatgcgagggctggcggggaagctattttgaagaaaaacaaagggcaattttcaggtcttcagagcaatgtggtctctgccccactgggctggccctgaccttcactccgggctggttgacctcacatacgtgtgtagctgtggctattcgtcacgttacgttgcccagcagagtagcttaccatggccattgagcatgccctctgcttccgccagtgtgctgttttatttcatttttgctgcaatgcggaatgaagcagagtgggccaccaagcagcatcctcacaggcagctggtgacccgaggaa
